United States Patent Application Publication US 2026/0241032 A1, published August 20, 2026 (application 18/872,544).

The application's sequence listing, which the Patent Office published only in electronic form, follows.

SEQUENCE LISTING (14354 sequences)

SEQ ID NO: 1 - protein, 986 aa, unidentified
  source 1..986: note = Deltaproteobacteria sp.
MEKRINKIRKKLSADNATKPVSRSGPMKTLLVRVMTDDLKKRLEKRRKKPEVMPQVISNNAANNLRMLLDDYTKMKEAILQVYWQEFKDDHVGLMCKFAQPASKKIDQNKLKPEMDEKGNLTTAGFACSQCGQPLFVYKLEQVSEKGKAYTNYFGRCNVAEHEKLILLAQLKPEKDSDEAVTYSLGKFGQRALDFYSIHVTKESTHPVKPLAQIAGNRYASGPVGKALSDACMGTIASFLSKYQDIIIEHQKVVKGNQKRLESLRELAGKENLEYPSVTLPPQPHTKEGVDAYNEVIARVRMWVNLNLWQKLKLSRDDAKPLLRLKGFPSFPVVERRENEVDWWNTINEVKKLIDAKRDMGRVFWSGVTAEKRNTILEGYNYLPNENDHKKREGSLENPKKPAKRQFGDLLLYLEKKYAGDWGKVFDEAWERIDKKIAGLTSHIEREEARNAEDAQSKAVLTDWLRAKASFVLERLKEMDEKEFYACEIQLQKWYGDLRGNPFAVEAENRVVDISGFSIGSDGHSIQYRNLLAWKYLENGKREFYLLMNYGKKGRIRFTDGTDIKKSGKWQGLLYGGGKAKVIDLTFDPDDEQLIILPLAFGTRQGREFIWNDLLSLETGLIKLANGRVIEKTIYNKKIGRDEPALFVALTFERREVVDPSNIKPVNLIGVDRGENIPAVIALTDPEGCPLPEFKDSSGGPTDILRIGEGYKEKQRAIQAAKEVEQRRAGGYSRKFASKSRNLADDMVRNSARDLFYHAVTHDAVLVFENLSRGFGRQGKRTFMTERQYTKMEDWLTAKLAYEGLTSKTYLSKTLAQYTSKTCSNCGFTITTADYDGMLVRLKKTSDGWATTLNNKELKAEGQITYYNRYKRQTVEKELSAELDRLSEESGNNDISKWTKGRRDEALFLLKKRFSHRPVQEQFVCLDCGHEVHADEQAALNIARSWLFLNSNSTEFKSYKSGKQPFVGAWQAFYKRRLKEVWKPNA

SEQ ID NO: 2 - protein, 978 aa, unidentified
  source 1..978: note = Planctomycetes sp.
MQEIKRINKIRRRLVKDSNTKKAGKTGPMKTLLVRVMTPDLRERLENLRKKPENIPQPISNTSRANLNKLLTDYTEMKKAILHVYWEEFQKDPVGLMSRVAQPAPKNIDQRKLIPVKDGNERLTSSGFACSQCCQPLYVYKLEQVNDKGKPHTNYFGRCNVSEHERLILLSPHKPEANDELVTYSLGKFGQRALDFYSIHVTRESNHPVKPLEQIGGNSCASGPVGKALSDACMGAVASFLTKYQDIILEHQKVIKKNEKRLANLKDIASANGLAFPKITLPPQPHTKEGIEAYNNVVAQIVIWVNLNLWQKLKIGRDEAKPLQRLKGFPSFPLVERQANEVDWWDMVCNVKKLINEKKEDGKVFWQNLAGYKRQEALLPYLSSEEDRKKGKKFARYQFGDLLLHLEKKHGEDWGKVYDEAWERIDKKVEGLSKHIKLEEERRSEDAQSKAALTDWLRAKASFVIEGLKEADKDEFCRCELKLQKWYGDLRGKPFAIEAENSILDISGFSKQYNCAFIWQKDGVKKLNLYLIINYFKGGKLRFKKIKPEAFEANRFYTVINKKSGEIVPMEVNFNFDDPNLIILPLAFGKRQGREFIWNDLLSLETGSLKLANGRVIEKTLYNRRTRQDEPALFVALTFERREVLDSSNIKPMNLIGIDRGENIPAVIALTDPEGCPLSRFKDSLGNPTHILRIGESYKEKQRTIQAAKEVEQRRAGGYSRKYASKAKNLADDMVRNTARDLLYYAVTQDAMLIFENLSRGFGRQGKRTFMAERQYTRMEDWLTAKLAYEGLPSKTYLSKTLAQYTSKTCSNCGFTITSADYDRVLEKLKKTATGWMTTINGKELKVEGQITYYNRYKRQNVVKDLSVELDRLSEESVNNDISSWTKGRSGEALSLLKKRFSHRPVQEKFVCLNCGFETHADEQAALNIARSWLFLRSQEYKKYQTNKTTGNTDKRAFVETWQSFYRKKLKEVWKPAV

SEQ ID NO: 3 - protein, 855 aa, unidentified
  source 1..855: note = Candidatus Sungbacteria sp.
MDNANKPSTKSLVNTTRISDHFGVTPGQVTRVFSFGIIPTKRQYAIIERWFAAVEAARERLYGMLYAHFQENPPAYLKEKFSYETFFKGRPVLNGLRDIDPTIMTSAVFTALRHKAEGAMAAFHTNHRRLFEEARKKMREYAECLKANEALLRGAADIDWDKIVNALRTRLNTCLAPEYDAVIADFGALCAFRALIAETNALKGAYNHALNQMLPALVKVDEPEEAEESPRLRFFNGRINDLPKFPVAERETPPDTETIIRQLEDMARVIPDTAEILGYIHRIRHKAARRKPGSAVPLPQRVALYCAIRMERNPEEDPSTVAGHFLGEIDRVCEKRRQGLVRTPFDSQIRARYMDIISFRATLAHPDRWTEIQFLRSNAASRRVRAETISAPFEGFSWTSNRTNPAPQYGMALAKDANAPADAPELCICLSPSSAAFSVREKGGDLIYMRPTGGRRGKDNPGKEITWVPGSFDEYPASGVALKLRLYFGRSQARRMLTNKTWGLLSDNPRVFAANAELVGKKRNPQDRWKLFFHMVISGPPPVEYLDFSSDVRSRARTVIGINRGEVNPLAYAVVSVEDGQVLEEGLLGKKEYIDQLIETRRRISEYQSREQTPPRDLRQRVRHLQDTVLGSARAKIHSLIAFWKGILAIERLDDQFHGREQKIIPKKTYLANKTGFMNALSFSGAVRVDKKGNPWGGMIEIYPGGISRTCTQCGTVWLARRPKNPGHRDAMVVIPDIVDDAAATGFDNVDCDAGTVDYGELFTLSREWVRLTPRYSRVMRGTLGDLERAIRQGDDRKSRQMLELALEPQPQWGQFFCHRCGFNGQSDVLAATNLARRAISLIRRLPDTDTPPTP

SEQ ID NO: 4 - protein, 977 aa, synthetic construct
QEIKRINKIRRRLVKDSNTKKAGKTGPMKTLLVRVMTPDLRERLENLRKKPENIPQPISNTSRANLNKLLTDYTEMKKAILHVYWEEFQKDPVGLMSRVAQPASKKIDQNKLKPEMDEKGNLTTAGFACSQCGQPLFVYKLEQVSEKGKAYTNYFGRCNVAEHEKLILLAQLKPEKDSDEAVTYSLGKFGQRALDFYSIHVTKESTHPVKPLAQIAGNRYASGPVGKALSDACMGTIASFLSKYQDIIIEHQKVVKGNQKRLESLRELAGKENLEYPSVTLPPQPHTKEGVDAYNEVIARVRMWVNLNLWQKLKLSRDDAKPLLRLKGFPSFPLVERQANEVDWWDMVCNVKKLINEKKEDGKVFWQNLAGYKRQEALRPYLSSEEDRKKGKKFARYQLGDLLLHLEKKHGEDWGKVYDEAWERIDKKVEGLSKHIKLEEERRSEDAQSKAALTDWLRAKASFVIEGLKEADKDEFCRCELKLQKWYGDLRGKPFAIEAENSILDISGFSKQYNCAFIWQKDGVKKLNLYLIINYFKGGKLRFKKIKPEAFEANRFYTVINKKSGEIVPMEVNFNFDDPNLIILPLAFGKRQGREFIWNDLLSLETGSLKLANGRVIEKTLYNRRTRQDEPALFVALTFERREVLDSSNIKPMNLIGVDRGENIPAVIALTDPEGCPLSRFKDSLGNPTHILRIGESYKEKQRTIQAKKEVEQRRAGGYSRKYASKAKNLADDMVRNTARDLLYYAVTQDAMLIFENLSRGFGRQGKRTFMAERQYTRMEDWLTAKLAYEGLSKTYLSKTLAQYTSKTCSNCGFTITSADYDRVLEKLKKTATGWMTTINGKELKVEGQITYYNRYKRQNVVKDLSVELDRLSEESVNNDISSWTKGRSGEALSLLKKRFSHRPVQEKFVCLNCGFETHADEQAALNIARSWLFLRSQEYKKYQTNKTTGNTDKRAFVETWQSFYRKKLKEVWKPAV

SEQ ID NO: 5 - protein, 978 aa, synthetic construct
QEIKRINKIRRRLVKDSNTKKAGKTGPMKTLLVRVMTPDLRERLENLRKKPENIPQPISNTSRANLNKLLTDYTEMKKAILHVYWEEFQKDPVGLMSRVAQPASKKIDQNKLKPEMDEKGNLTTAGFACSQCGQPLFVYKLEQVSEKGKAYTNYFGRCNVAEHEKLILLAQLKPEKDSDEAVTYSLGKFGQRALDFYSIHVTKESTHPVKPLAQIAGNRYASGPVGKALSDACMGTIASFLSKYQDIIIEHQKVVKGNQKRLESLRELAGKENLEYPSVTLPPQPHTKEGVDAYNEVIARVRMWVNLNLWQKLKLSRDDAKPLLRLKGFPSFPLVERQANEVDWWDMVCNVKKLINEKKEDGKVFWQNLAGYKRQEALRPYLSSEEDRKKGKKFARYQLGDLLLHLEKKHGEDWGKVYDEAWERIDKKVEGLSKHIKLEEERRSEDAQSKAALTDWLRAKASFVIEGLKEADKDEFCRCELKLQKWYGDLRGKPFAIEAENSILDISGFSKQYNCAFIWQKDGVKKLNLYLIINYFKGGKLRFKKIKPEAFEANRFYTVINKKSGEIVPMEVNFNFDDPNLIILPLAFGKRQGREFIWNDLLSLETGSLKLANGRVIEKTLYNRRTRQDEPALFVALTFERREVLDSSNIKPMNLIGVDRGENIPAVIALTDPEGCPLSRFKDSLGNPTHILRIGESYKEKQRTIQAKKEVEQRRAGGYSRKYASKAKNLADDMVRNTARDLLYYAVTQDAMLIFENLSRGFGRQGKRTFMAERQYTRMEDWLTAKLAYEGLPSKTYLSKTLAQYTSKTCSNCGFTITSADYDRVLEKLKKTATGWMTTINGKELKVEGQITYYNRYKRQNVVKDLSVELDRLSEESVNNDISSWTKGRSGEALSLLKKRFSHRPVQEKFVCLNCGFETHADEQAALNIARSWLFLRSQEYKKYQTNKTTGNTDKRAFVETWQSFYRKKLKEVWKPAV

SEQ ID NO: 6 - protein, 979 aa, synthetic construct
QEIKRINKIRRRLVKDSNTKKAGKTRGPMKTLLVRVMTPDLRERLENLRKKPENIPQPISNTSRANLNKLLTDYTEMKKAILHVYWEEFQKDPVGLMSRVAQPASKKIDQNKLKPEMDEKGNLTTAGFACSQCGQPLFVYKLEQVSEKGKAYTNYFGRCNVAEHEKLIKLAQLKPEKDSDEAVTYSLGKFGQRALDFYSIHVTKESTHPVKPLAQIAGNRYASSPVGKALSDACMGTIASFLSKYQDIIIEHQKVVKGNQKRLESLRELAGKENLEYPSVTLPPQPHTKEGVDAYNEVIARVRMWVNLNLWQKLKLSRDDAKPLLRLKGFPSFPLVERQANEVDWWDMVCNVKKLINEKKEDGKVFWQNLAGYKRQEALRPYLSSEEDRKKGKKFARYQLGDLLLHLEKKHGEDWGKVYDEAWERIDKKVEGLSKHIKLEEERRSEDAQSKAALTDWLRAKASFVIEGLKEADKDEFCRCELKLQKWYGDLRGKPFAIEAENSILDISGFSKQYNCAFIWQKDGVKKLNLYLIINYFKGGKLRFKKIKPEAFEANRFYTVINKKSGEIVPMEVNFNFDDPNLIILPLAFGKRQGREFIWNDLLSLETGSLKLANGRVIEKTLYNRRTRQDEPALFVALTFERREVLDSSNIKPMNLIGVDRGENIPAVIALTDPEGCPLSRFKDSLGNPTHILRIGESYKEKQRTIQAKKEVEQRRAGGYSRKYASKAKNLADDMVRNTARDLLYYAVTQDAMLIFENLSRGFGRQGKRTFMAERQYTRMEDWLTAKLAYEGLPSKTYLSKTLAQYTSKTCSNCGFTITSADYDRVLEKLKKTATGWMTTINGKELKVEGQITYYNRYKRQNVVKDLSVELDRLSEESVNNDISSWTKGRSGEALSLLKKRFSHRPVQEKFVCLNCGFETHADEQAALNIARSWLFLRSQEYKKYQTNKTTGNTDKRAFVETWQSFYRKKLKEVWKPAV

SEQ ID NO: 7 - protein, 978 aa, synthetic construct
QEIKRINKIRRRLVKDSNTKKAGKTGPMKTLLVRVMTPDLRERLENLRKKPENIPQPISNTSRANLNKLLTDYTEMKKAILHVYWEEFQKDPVGLMSRVAQPASKKIDQNKLKPEMDEKGNLTTAGFACSQCGQPLFVYKLEQVSEKGKAYTNYFGRCNVAEHEKLILLAQLKPEKDSDEAVTYSLGKFGQRALDFYSIHVTKESTHPVKPLAQIAGNRYASGPVGKALSDACMGTIASFLSKYQDIIIEHQKVVKGNQKRLESLRELAGKENLEYPSVTLPPQPHTKEGVDAYNEVIARVRMWVNLNLWQKLKLSRDDAKPLLRLKKFPSFPLVERQANEVDWWDMVCNVKKLINEKKEDGKVFWQNLAGYKRQEALRPYLSSEEDRKKGKKFARYQLGDLLLHLEKKHGEDWGKVYDEAWERIDKKVEGLSKHIKLEEERRSEDAQSKAALTDWLRAKASFVIEGLKEADKDEFCRCELKLQKWYGDLRGKPFAIEAENSILDISGFSKQYNCAFIWQKDGVKKLNLYLIINYFKGGKLRFKKIKPEAFEANRFYTVINKKSGEIVPMEVNFNFDDPNLIILPLAFGKRQGREFIWNDLLSLETGSLKLANGRVIEKTLYNRRTRQDEPALFVALTFERREVLDSSNIKPMNLIGVDRGENIPAVIALTDPEGCPLSRFKDSLGNPTHILRIGESYKEKQRTIQAKKEVEQRRAGGYSRKYASKAKNLADDMVRNTARDLLYYAVTQDAMLIFENLSRGFGRQGKRTFMAERQYTRMEDWLTAKLAYEGLPSKTYLSKTLAQYTSKTCSNCGFTITSADYDRVLEKLKKTATGWMTTINGKELKVEGQITYYNRYKRQNVVKDLSVELDRLSEESVNNDISSWTKGRSGEALSLLKKRFSHRPVQEKFVCLNCGFETHADEQAALNIARSWLFLRSQEYKKYQTNKTTGNTDKRAFVETWQSFYRKKLKEVWKPAV

SEQ ID NO: 8 - protein, 976 aa, synthetic construct
QEIKRINKIRRRLVKDSNTKKAGKTGPMKTLLVRVMTPDLRERLENLRKKPENIPQPISNTSRANLNKLLTDYTEMKKAILHVYWEEFQKDPVGLMSRVAQPAPKNIDQRKLIPVKDGNERLTSSGFACSQCCQPLYVYKLEQVNDKGKPHTNYFGRCNVSEHERLILLSPHKPEANDELVTYSLGKFGQRALDFYSIHVTRESNHPVKPLEQIGGNSCASGPVGKALSDACMGAVASFLTKYQDIILEHQKVIKKNEKRLANLKDIASANGLAFPKITLPPQPHTKEGIEAYNNVVAQIVIWVNLNLWQKLKIGRDEAKPLQRLKGFPSFPLVERQANEVDWWDMVCNVKKLINEKKEDGKVFWQNLAGYKRQEALRPYLSSEEDRKKGKKFARYQFGDLLLHLEKKHGEDWGKVYDEAWERIDKKVEGLSKHIKLEEERRSEDAQSKAALTDWLRAKASFVIEGLKEADKDEFCRCELKLQKWYGDLRGKPFAIEAENSILDISGFSKQYNCAFIWQKDGVKKLNLYLIINYFKGGKLRFKKIKPEAFEANRFYTVINKKSGEIVPMEVNFNFDDPNLIILPLAFGKRQGREFIWNDLLSLETGSLKLANGRVIEKTLYNRRTRQDEPALFVALTFERREVLDSSNIKPMNLIGIDRGENIPAVIALTDPEGCPLSRFKDSLGNPTHILRIGESYKEKQRTIQAKKEVEQRRAGGYSRKYASKAKNLADDMVRNTARDLLYYAVTQDAMLIFENLSRGFGRQGKRTFMAERQYTRMEDWLTAKLAYEGLSKTYLSKTLAQYTSKTCSNCGFTITSADYDRVLEKLKKTATGWMTTINGKELKVEGQITYYNRYKRQNVVKDLSVELDRLSEESVNNDISSWTKGRSGEALSLLKKRFSHRPVQEKFVCLNCGFETHADEQAALNIARSWLFLRSQEYKKYQTNKTTGNTDKRAFVETWQSFYRKKLKEVWKPAV

SEQ ID NO: 9 - protein, 976 aa, synthetic construct
QEIKRINKIRRRLVKDSNTKKAGKTGPMKTLLVRVMTPDLRERLENLRKKPENIPQPISNTSRANLNKLLTDYTEMKKAILHVYWEEFQKDPVGLMSRVAQPAPKNIDQRKLIPVKDGNERLTSSGFACSQCCQPLYVYKLEQVNDKGKPHTNYFGRCNVSEHERLILLSPHKPEANDELVTYSLGKFGQRALDFYSIHVTRESNHPVKPLEQIGGNSCASGPVGKALSDACMGAVASFLTKYQDIILEHQKVIKKNEKRLANLKDIASANGLAFPKITLPPQPHTKEGIEAYNNVVAQIVIWVNLNLWQKLKIGRDEAKPLQRLKGFPSFPLVERQANEVDWWDMVCNVKKLINEKKEDGKVFWQNLAGYKRQEALRPYLSSEEDRKKGKKFARYQFGDLLLHLEKKHGEDWGKVYDEAWERIDKKVEGLSKHIKLEEERRSEDAQSKAALTDWLRAKASFVIEGLKEADKDEFCRCELKLQKWYGDLRGKPFAIEAENSILDISGFSKQYNCAFIWQKDGVKKLNLYLIINYFKGGKLRFKKIKPEAFEANRFYTVINKKSGEIVPMEVNFNFDDPNLIILPLAFGKRQGREFIWNDLLSLETGSLKLANGRVIEKTLYNRRTRQDEPALFVALTFERREVLDSSNIKPMNLIGIDRGENIPAVIALTDPEGCPLSRFKDSLGNPTHILRIGESYKEKQRTIQAKKEVEQRRAGGYSRKYASKAKNLADDMVRNTARDLLYYAVTQDAMLIFENLSRGFGRQGKRTFMAERQYTRMEDWLTAKLAYEGLSKTYLSKTLAQYTSKTCSCPKCAAVWSNPIELKLANGSFTLTYRDELRENIKALKLERDVSGVWHGSWLADGKKIQSFTPKSLKELNSLTNKLATAKGDERRKLERDMLELFKHRHRNTYDRFYCLFCDEQAALNIARSWLFLRSQEYKKYQTNKTTGNTDKRAFVETWQSFYRKKLKEVWKPAV

SEQ ID NO: 10 - protein, 966 aa, synthetic construct
QEIKRINKIRRRLVKDSNTKKAGKTGPMKTLLVRVMTPDLRERLENLRKKPENIPQPISNTSRANLNKLLTDYTEMKKAILHVYWEEFQKDPVGLMSRVAQPAPKNIDQRKLIPVKDGNERLTSSGFACSQCCQPLYVYKLEQVNDKGKPHTNYFGRCNVSEHERLILLSPHKPEANDELVTYSLGKFGQRALDFYSIHVTRESNHPVKPLEQIGGNSCASGPVGKALSDACMGAVASFLTKYQDIILEHQKVIKKNEKRLANLKDIASANGLAFPKITLPPQPHTKEGIEAYNNVVAQIVIWVNLNLWQKLKIGRDEAKPLQRLKGFPSFPLVERQANEVDWWDMVCNVKKLINEKKEDGKVFWQNLAGYKRQEALRPYLSSEEDRKKGKKFARYQFGDLLLHLEKKHGEDWGKVYDEAWERIDKKVEGLSKHIKLEEERRSEDAQSKAALTDWLRAKASFVIEGLKEADKDEFCRCELKLQKWYGDLRGKPFAIEAENSILDISGFSKQYNCAFIWQKDGVKKLNLYLIINYFKGGKLRFKKIKPEAFEANRFYTVINKKSGEIVPMEVNFNFDDPNLIILPLAFGKRQGREFIWNDLLSLETGSLKLANGRVIEKTLYNRRTRQDEPALFVALTFERREVLDSSNIKPMNLIGIDRGENIPAVIALTDPEGCPLSRFKDSLGNPTHILRIGESYKEKQRTIQAKKEVEQRRAGGYSRKYASKAKNLADDMVRNTARDLLYYAVTQDAMLIFENLSRGFGRQGKRTFMAERQYTRMEDWLTAKLAYEGLSKTYLSKTLAQYTSKTCSCINCRTVWNSKLKQDICDYSISNNFKNMDFAKSLLEYKKDKFKLNEDFTIFNFRNRQSEKKNLKDLKQAVDNKKTEEAFRYLKLALGPRVKQQTFICPKCDEQAALNIARSWLFLRSQEYKKYQTNKTTGNTDKRAFVETWQSFYRKKLKEVWKPAV

SEQ ID NO: 11 - protein, 969 aa, synthetic construct
QEIKRINKIRRRLVKDSNTKKAGKTGPMKTLLVRVMTPDLRERLENLRKKPENIPQPISNTSRANLNKLLTDYTEMKKAILHVYWEEFQKDPVGLMSRVAQPAPKNIDQRKLIPVKDGNERLTSSGFACSQCCQPLYVYKLEQVNDKGKPHTNYFGRCNVSEHERLILLSPHKPEANDELVTYSLGKFGQRALDFYSIHVTRESNHPVKPLEQIGGNSCASGPVGKALSDACMGAVASFLTKYQDIILEHQKVIKKNEKRLANLKDIASANGLAFPKITLPPQPHTKEGIEAYNNVVAQIVIWVNLNLWQKLKIGRDEAKPLQRLKGFPSFPLVERQANEVDWWDMVCNVKKLINEKKEDGKVFWQNLAGYKRQEALRPYLSSEEDRKKGKKFARYQFGDLLLHLEKKHGEDWGKVYDEAWERIDKKVEGLSKHIKLEEERRSEDAQSKAALTDWLRAKASFVIEGLKEADKDEFCRCELKLQKWYGDLRGKPFAIEAENSILDISGFSKQYNCAFIWQKDGVKKLNLYLIINYFKGGKLRFKKIKPEAFEANRFYTVINKKSGEIVPMEVNFNFDDPNLIILPLAFGKRQGREFIWNDLLSLETGSLKLANGRVIEKTLYNRRTRQDEPALFVALTFERREVLDSSNIKPMNLIGIDRGENIPAVIALTDPEGCPLSRFKDSLGNPTHILRIGESYKEKQRTIQAKKEVEQRRAGGYSRKYASKAKNLADDMVRNTARDLLYYAVTQDAMLIFENLSRGFGRQGKRTFMAERQYTRMEDWLTAKLAYEGLSKTYLSKTLAQYTSKTCSCPKCDFNFNKEIRREKINKMNQEEMIEIINNLITKENFYYSPQLSILIPQKWVSYNENEKYPEEISIESIKKYIKENKLEEALRYFKTITPRITQDKFVCLKCDEQAALNIARSWLFLRSQEYKKYQTNKTTGNTDKRAFVETWQSFYRKKLKEVWKPAV

SEQ ID NO: 12 - protein, 972 aa, synthetic construct
QEIKRINKIRRRLVKDSNTKKAGKTGPMKTLLVRVMTPDLRERLENLRKKPENIPQPISNTSRANLNKLLTDYTEMKKAILHVYWEEFQKDPVGLMSRVAQPAPKNIDQRKLIPVKDGNERLTSSGFACSQCCQPLYVYKLEQVNDKGKPHTNYFGRCNVSEHERLILLSPHKPEANDELVTYSLGKFGQRALDFYSIHVTRESNHPVKPLEQIGGNSCASGPVGKALSDACMGAVASFLTKYQDIILEHQKVIKKNEKRLANLKDIASANGLAFPKITLPPQPHTKEGIEAYNNVVAQIVIWVNLNLWQKLKIGRDEAKPLQRLKGFPSFPLVERQANEVDWWDMVCNVKKLINEKKEDGKVFWQNLAGYKRQEALRPYLSSEEDRKKGKKFARYQFGDLLLHLEKKHGEDWGKVYDEAWERIDKKVEGLSKHIKLEEERRSEDAQSKAALTDWLRAKASFVIEGLKEADKDEFCRCELKLQKWYGDLRGKPFAIEAENSILDISGFSKQYNCAFIWQKDGVKKLNLYLIINYFKGGKLRFKKIKPEAFEANRFYTVINKKSGEIVPMEVNFNFDDPNLIILPLAFGKRQGREFIWNDLLSLETGSLKLANGRVIEKTLYNRRTRQDEPALFVALTFERREVLDSSNIKPMNLIGIDRGENIPAVIALTDPEGCPLSRFKDSLGNPTHILRIGESYKEKQRTIQAKKEVEQRRAGGYSRKYASKAKNLADDMVRNTARDLLYYAVTQDAMLIFENLSRGFGRQGKRTFMAERQYTRMEDWLTAKLAYEGLSKTYLSKTLAQYTSKTCSCSNCGFVITNAHYEDMFNKLSKMQSGWKTFLNGRELEVSGDIKYYSRIKKQDVTKNLIEEFNRLAEESGTTDIKAWSKKRKEFAVFLLKKKFNHRPEQERFVCVDCDEQAALNIARSWLFLRSQEYKKYQTNKTTGNTDKRAFVETWQSFYRKKLKEVWKPAV

SEQ ID NO: 13 - protein, 972 aa, synthetic construct
QEIKRINKIRRRLVKDSNTKKAGKTGPMKTLLVRVMTPDLRERLENLRKKPENIPQPISNTSRANLNKLLTDYTEMKKAILHVYWEEFQKDPVGLMSRVAQPAPKNIDQRKLIPVKDGNERLTSSGFACSQCCQPLYVYKLEQVNDKGKPHTNYFGRCNVSEHERLILLSPHKPEANDELVTYSLGKFGQRALDFYSIHVTRESNHPVKPLEQIGGNSCASGPVGKALSDACMGAVASFLTKYQDIILEHQKVIKKNEKRLANLKDIASANGLAFPKITLPPQPHTKEGIEAYNNVVAQIVIWVNLNLWQKLKIGRDEAKPLQRLKGFPSFPLVERQANEVDWWDMVCNVKKLINEKKEDGKVFWQNLAGYKRQEALRPYLSSEEDRKKGKKFARYQFGDLLLHLEKKHGEDWGKVYDEAWERIDKKVEGLSKHIKLEEERRSEDAQSKAALTDWLRAKASFVIEGLKEADKDEFCRCELKLQKWYGDLRGKPFAIEAENSILDISGFSKQYNCAFIWQKDGVKKLNLYLIINYFKGGKLRFKKIKPEAFEANRFYTVINKKSGEIVPMEVNFNFDDPNLIILPLAFGKRQGREFIWNDLLSLETGSLKLANGRVIEKTLYNRRTRQDEPALFVALTFERREVLDSSNIKPMNLIGIDRGENIPAVIALTDPEGCPLSRFKDSLGNPTHILRIGESYKEKQRTIQAKKEVEQRRAGGYSRKYASKAKNLADDMVRNTARDLLYYAVTQDAMLIFENLSRGFGRQGKRTFMAERQYTRMEDWLTAKLAYEGLSKTYLSKTLAQYTSKTCSCANCGFVITNAHYGNMFENLSKTQSEWKTFLNDKGLEVSGDIKYYSRIKKQDVTKNLIEEFNRLAEESGTTDIKAWSKKRKEFAIFLLKKKFNHRPVQERFVCIDCDEQAALNIARSWLFLRSQEYKKYQTNKTTGNTDKRAFVETWQSFYRKKLKEVWKPAV

SEQ ID NO: 14 - protein, 970 aa, synthetic construct
QEIKRINKIRRRLVKDSNTKKAGKTGPMKTLLVRVMTPDLRERLENLRKKPENIPQPISNTSRANLNKLLTDYTEMKKAILHVYWEEFQKDPVGLMSRVAQPAPKNIDQRKLIPVKDGNERLTSSGFACSQCCQPLYVYKLEQVNDKGKPHTNYFGRCNVSEHERLILLSPHKPEANDELVTYSLGKFGQRALDFYSIHVTRESNHPVKPLEQIGGNSCASGPVGKALSDACMGAVASFLTKYQDIILEHQKVIKKNEKRLANLKDIASANGLAFPKITLPPQPHTKEGIEAYNNVVAQIVIWVNLNLWQKLKIGRDEAKPLQRLKGFPSFPLVERQANEVDWWDMVCNVKKLINEKKEDGKVFWQNLAGYKRQEALRPYLSSEEDRKKGKKFARYQFGDLLLHLEKKHGEDWGKVYDEAWERIDKKVEGLSKHIKLEEERRSEDAQSKAALTDWLRAKASFVIEGLKEADKDEFCRCELKLQKWYGDLRGKPFAIEAENSILDISGFSKQYNCAFIWQKDGVKKLNLYLIINYFKGGKLRFKKIKPEAFEANRFYTVINKKSGEIVPMEVNFNFDDPNLIILPLAFGKRQGREFIWNDLLSLETGSLKLANGRVIEKTLYNRRTRQDEPALFVALTFERREVLDSSNIKPMNLIGIDRGENIPAVIALTDPEGCPLSRFKDSLGNPTHILRIGESYKEKQRTIQAKKEVEQRRAGGYSRKYASKAKNLADDMVRNTARDLLYYAVTQDAMLIFENLSRGFGRQGKRTFMAERQYTRMEDWLTAKLAYEGLSKTYLSKTLAQYTSKTCSCSGCGEPHASANGSFYFENLIREDSGFRTRLTNGKEVSLDFEYQYWAREERKMRTANVSERLREILGDREANDVAATTREKAQSLLRRALSPRVRQADYRCPNCDEQAALNIARSWLFLRSQEYKKYQTNKTTGNTDKRAFVETWQSFYRKKLKEVWKPAV

SEQ ID NO: 15 - protein, 1073 aa, synthetic construct
QEIKRINKIRRRLVKDSNTKKAGKTGPMKTLLVRVMTPDLRERLENLRKKPENIPQPISNTSRANLNKLLTDYTEMKKAILHVYWEEFQKDPVGLMSRVAQPAPKNIDQRKLIPVKDGNERLTSSGFACSQCCQPLYVYKLEQVNDKGKPHTNYFGRCNVSEHERLILLSPHKPEANDELVTYSLGKFGQRALDFYSIHVTRESNHPVKPLEQIGGNSCASGPVGKALSDACMGAVASFLTKYQDIILEHQKVIKKNEKRLANLKDIASANGLAFPKITLPPQPHTKEGIEAYNNVVAQIVIWVNLNLWQKLKIGRDEAKPLQRLKGFPSFPLVERQANEVDWWDMVCNVKKLINEKKEDGKVFWQNLAGYKRQEALRPYLSSEEDRKKGKKFARYQFGDLLLHLEKKHGEDWGKVYDEAWERIDKKVEGLSKHIKLEEERRSEDAQSKAALTDWLRAKASFVIEGLKEADKDEFCRCELKLQKWYGDLRGKPFAIEAENSILDISGFSKQYNCAFIWQKDGVKKLNLYLIINYFKGGKLRFKKIKPEAFEANRFYTVINKKSGEIVPMEVNFNFDDPNLIILPLAFGKRQGREFIWNDLLSLETGSLKLANGRVIEKTLYNRRTRQDEPALFVALTFERREVLDSSNIKPMNLIGIDRGENIPAVIALTDPEGCPLSRFKDSLGNPTHILRIGESYKEKQRTIQAKKEVEQRRAGGYSRKYASKAKNLADDMVRNTARDLLYYAVTQDAMLIFENLSRGFGRQGKRTFMAERQYTRMEDWLTAKLAYEGLSKTYLSKTLAQYTSKTCSCSGCGEPHASANGSFYFENLIREDSGFRTRLTNGKEVSLDFEYQYWAREERKMRTANVSERLREILGDREANDVAATTREKAQSLLRRALSPRVRQADYRCPNCCSSCGEVFSSAWYNKVTTTIQKHDGRWQVILGTGKHLQLPDTYKTYMRGRGEKTCNTAERLEELFKGRPLQDLPPTSRKDVDSLVKKLIHHRPKRGEFVCPCCDEQAALNIARSWLFLRSQEYKKYQTNKTTGNTDKRAFVETWQSFYRKKLKEVWKPAV

SEQ ID NO: 16 - protein, 966 aa, synthetic construct
QEIKRINKIRRRLVKDSNTKKAGKTGPMKTLLVRVMTPDLRERLENLRKKPENIPQPISNTSRANLNKLLTDYTEMKKAILHVYWEEFQKDPVGLMSRVAQPAPKNIDQRKLIPVKDGNERLTSSGFACSQCCQPLYVYKLEQVNDKGKPHTNYFGRCNVSEHERLILLSPHKPEANDELVTYSLGKFGQRALDFYSIHVTRESNHPVKPLEQIGGNSCASGPVGKALSDACMGAVASFLTKYQDIILEHQKVIKKNEKRLANLKDIASANGLAFPKITLPPQPHTKEGIEAYNNVVAQIVIWVNLNLWQKLKIGRDEAKPLQRLKGFPSFPLVERQANEVDWWDMVCNVKKLINEKKEDGKVFWQNLAGYKRQEALRPYLSSEEDRKKGKKFARYQFGDLLLHLEKKHGEDWGKVYDEAWERIDKKVEGLSKHIKLEEERRSEDAQSKAALTDWLRAKASFVIEGLKEADKDEFCRCELKLQKWYGDLRGKPFAIEAENSILDISGFSKQYNCAFIWQKDGVKKLNLYLIINYFKGGKLRFKKIKPEAFEANRFYTVINKKSGEIVPMEVNFNFDDPNLIILPLAFGKRQGREFIWNDLLSLETGSLKLANGRVIEKTLYNRRTRQDEPALFVALTFERREVLDSSNIKPMNLIGIDRGENIPAVIALTDPEGCPLSRFKDSLGNPTHILRIGESYKEKQRTIQAKKEVEQRRAGGYSRKYASKAKNLADDMVRNTARDLLYYAVTQDAMLIFENLSRGFGRQGKRTFMAERQYTRMEDWLTAKLAYEGLSKTYLSKTLAQYTSKTCSCSNCGFVASSEKLKNVSLELKNIDGKDIWFANLDGKEISLDINYEAYVKKEGHNKTFNANEEITRLKQKNTKKNKELIEKALLNALNPRKTQAEYICPICDEQAALNIARSWLFLRSQEYKKYQTNKTTGNTDKRAFVETWQSFYRKKLKEVWKPAV

SEQ ID NO: 17 - protein, 971 aa, synthetic construct
QEIKRINKIRRRLVKDSNTKKAGKTGPMKTLLVRVMTPDLRERLENLRKKPENIPQPISNTSRANLNKLLTDYTEMKKAILHVYWEEFQKDPVGLMSRVAQLPAGFNKPLAMETEDGQPVQSGFLCSQCGEPIFVHRYIWKSDRGKENISYVGKCSDPVHVRLIRLEQNKPKDEPITYSLGKFGKRALDFYSIHVTRESNHPVKPLEQIGGNSCASGPVGKALSDACMGAVASFLTKYQDIILEHQKVIKKNEKRLANLKDIASANGLAFPKITLPPQPHTKEGIEAYNNVVAQIVIWVNLNLWQKLKIGRDEAKPLQRLKGFPSFPLVERQANEVDWWDMVCNVKKLINEKKEDGKVFWQNLAGYKRQEALRPYLSSEEDRKKGKKFARYQFGDLLLHLEKKHGEDWGKVYDEAWERIDKKVEGLSKHIKLEEERRSEDAQSKAALTDWLRAKASFVIEGLKEADKDEFCRCELKLQKWYGDLRGKPFAIEAENSILDISGFSKQYNCAFIWQKDGVKKLNLYLIINYFKGGKLRFKKIKPEAFEANRFYTVINKKSGEIVPMEVNFNFDDPNLIILPLAFGKRQGREFIWNDLLSLETGSLKLANGRVIEKTLYNRRTRQDEPALFVALTFERREVLDSSNIKPMNLIGIDRGENIPAVIALTDPEGCPLSRFKDSLGNPTHILRIGESYKEKQRTIQAKKEVEQRRAGGYSRKYASKAKNLADDMVRNTARDLLYYAVTQDAMLIFENLSRGFGRQGKRTFMAERQYTRMEDWLTAKLAYEGLSKTYLSKTLAQYTSKTCSNCGFTITSADYDRVLEKLKKTATGWMTTINGKELKVEGQITYYNRYKRQNVVKDLSVELDRLSEESVNNDISSWTKGRSGEALSLLKKRFSHRPVQEKFVCLNCGFETHADEQAALNIARSWLFLRSQEYKKYQTNKTTGNTDKRAFVETWQSFYRKKLKEVWKPAV

SEQ ID NO: 18 - protein, 971 aa, synthetic construct
QEIKRINKIRRRLVKDSNTKKAGKTGPMKTLLVRVMTPDLRERLENLRKKPENIPQPISNTSRANLNKLLTDYTEMKKAILHVYWEEFQKDPVGLMSRVAQLPAGFNKPLTEETENEQPVQSGFSCNQCGKPIFVHNYIWKSDTGKEHTSYVGRCSDPEHNRLIRLEQNKPKDEPILYSLGKFSKRALDFYSIHVTRESNHPVKPLEQIGGNSCASGPVGKALSDACMGAVASFLTKYQDIILEHQKVIKKNEKRLANLKDIASANGLAFPKITLPPQPHTKEGIEAYNNVVAQIVIWVNLNLWQKLKIGRDEAKPLQRLKGFPSFPLVERQANEVDWWDMVCNVKKLINEKKEDGKVFWQNLAGYKRQEALRPYLSSEEDRKKGKKFARYQFGDLLLHLEKKHGEDWGKVYDEAWERIDKKVEGLSKHIKLEEERRSEDAQSKAALTDWLRAKASFVIEGLKEADKDEFCRCELKLQKWYGDLRGKPFAIEAENSILDISGFSKQYNCAFIWQKDGVKKLNLYLIINYFKGGKLRFKKIKPEAFEANRFYTVINKKSGEIVPMEVNFNFDDPNLIILPLAFGKRQGREFIWNDLLSLETGSLKLANGRVIEKTLYNRRTRQDEPALFVALTFERREVLDSSNIKPMNLIGIDRGENIPAVIALTDPEGCPLSRFKDSLGNPTHILRIGESYKEKQRTIQAKKEVEQRRAGGYSRKYASKAKNLADDMVRNTARDLLYYAVTQDAMLIFENLSRGFGRQGKRTFMAERQYTRMEDWLTAKLAYEGLSKTYLSKTLAQYTSKTCSNCGFTITSADYDRVLEKLKKTATGWMTTINGKELKVEGQITYYNRYKRQNVVKDLSVELDRLSEESVNNDISSWTKGRSGEALSLLKKRFSHRPVQEKFVCLNCGFETHADEQAALNIARSWLFLRSQEYKKYQTNKTTGNTDKRAFVETWQSFYRKKLKEVWKPAV

SEQ ID NO: 19 - protein, 986 aa, synthetic construct
QEIKRINKIRRRLVKDSNTKKAGKTGPMKTLLVRVMTPDLRERLENLRKKPENIPQPISNTSRANLNKLLTDYTEMKKAILHVYWEEFQKDPVGLMSRVAQPAPKNIDQRKLIPVKDGNERLTSSGFACSQCCQPLYVYKLEQVNDKGKPHTNYFGRCNVSEHERLILLSPHKPEANDELVTYSLGKFGQRALDFYSIHVTRESNHPVKPLEQIGGNSCASGPVGKALSDACMGAVASFLTKYQDIILEHQKVIKKNEKRLANLKDIASANGLAFPKITLPPQPHTKEGIEAYNNVVAQIVIWVNLNLWQKLKIGRDEAKPLQRLKGFPSFPLVERQANEVDWWDMVCNVKKLINEKKEDGKVFWQNLAGYKRQEALRPYLSSEEDRKKGKKFARYQFGDLLLHLEKKHGEDWGKVYDEAWERIDKKVEGLSKHIKLEEERRSEDAQSKAALTDWLRAKASFVIEGLKEADKDEFCRCELKLQKWYGDLRGKPFAIEAENSILDISGFSKQYNCAFIWQKDGVKKLNLYLIINYFKGGKLRFKKIKPEAFEANRFYTVINKKSGEIVPMEVNFNFDDPNLIILPLAFGKRQGREFIWNDLLSLETGSLKLANGRVIEKTLYNRRTRQDEPALFVALTFERREVLDSSNIKPMNLIGIDRGENIPAVIALTDPEGCPLSRFKDSLGNPTHILRIGESYKEKQRTIQAKKEVEQRRAGGYSRKYASKAKNLADDMVRNTARDLLYYAVTQDAMLIFENLSRGFGRQGKRTFMAERQYTRMEDWLTAKLAYEGLWTHKGKLPVHSKTYLSKTLAQYTSKTCSNCGFTITSADYDRVLEKLKKTATGWMTTINGKELKVEGQITYYNRYKRQNVVKDLSVELDRLSEESVNNDISSWTKGRSGEALSLLKKRFSHRPVQEKFVCLNCGFETHADEQAALNIARSWLFLRSQEYKKYQTNKTTGNTDKRAFVETWQSFYRKKLKEVWKPAV

SEQ ID NO: 20 - protein, 986 aa, synthetic construct
QEIKRINKIRRRLVKDSNTKKAGKTGPMKTLLVRVMTPDLRERLENLRKKPENIPQPISNTSRANLNKLLTDYTEMKKAILHVYWEEFQKDPVGLMSRVAQPAPKNIDQRKLIPVKDGNERLTSSGFACSQCCQPLYVYKLEQVNDKGKPHTNYFGRCNVSEHERLILLSPHKPEANDELVTYSLGKFGQRALDFYSIHVTRESNHPVKPLEQIGGNSCASGPVGKALSDACMGAVASFLTKYQDIILEHQKVIKKNEKRLANLKDIASANGLAFPKITLPPQPHTKEGIEAYNNVVAQIVIWVNLNLWQKLKIGRDEAKPLQRLKGFPSFPLVERQANEVDWWDMVCNVKKLINEKKEDGKVFWQNLAGYKRQEALRPYLSSEEDRKKGKKFARYQFGDLLLHLEKKHGEDWGKVYDEAWERIDKKVEGLSKHIKLEEERRSEDAQSKAALTDWLRAKASFVIEGLKEADKDEFCRCELKLQKWYGDLRGKPFAIEAENSILDISGFSKQYNCAFIWQKDGVKKLNLYLIINYFKGGKLRFKKIKPEAFEANRFYTVINKKSGEIVPMEVNFNFDDPNLIILPLAFGKRQGREFIWNDLLSLETGSLKLANGRVIEKTLYNRRTRQDEPALFVALTFERREVLDSSNIKPMNLIGIDRGENIPAVIALTDPEGCPLSRFKDSLGNPTHILRIGESYKEKQRTIQAKKEVEQRRAGGYSRKYASKAKNLADDMVRNTARDLLYYAVTQDAMLIFENLSRGFGRQGKRTFMAERQYTRMEDWLTAKLAYEGLWTYKGKLKAHSKTYLSKTLAQYTSKTCSNCGFTITSADYDRVLEKLKKTATGWMTTINGKELKVEGQITYYNRYKRQNVVKDLSVELDRLSEESVNNDISSWTKGRSGEALSLLKKRFSHRPVQEKFVCLNCGFETHADEQAALNIARSWLFLRSQEYKKYQTNKTTGNTDKRAFVETWQSFYRKKLKEVWKPAV

SEQ ID NO: 21 - protein, 976 aa, synthetic construct
QEIKRINKIRRRLVKDSNTKKAGKTGPMKTLLVRVMTPDLRERLENLRKKPENIPQPISNTSRANLNKLLTDYTEMKKAILHVYWEEFQKDPVGLMSRVAQPAPKNIDQRKLIPVKDGNERLTSSGFACSQCCQPLYVYKLEQVNDKGKPHTNYFGRCNVSEHERLILLSPHKPEANDELVTYSLGKFGQRALDFYSIHVTRESNHPVKPLEQIGGNSCASGPVGKALSDACMGAVASFLTKYQDIILEHQKVIKKNEKRLANLKDIASANGLAFPKITLPPQPHTKEGIEAYNNVVAQIVIWVNLNLWQKLKIGRDEAKPLQRLKGFPSFPLVERQANEVDWWDMVCNVKKLINEKKEDGKVFWQNLAGYKRQEALRPYLSSEEDRKKGKKFARYQLGDLLLHLEKKHGEDWGKVYDEAWERIDKKVEGLSKHIKLEEERRSEDAQSKAALTDWLRAKASFVIEGLKEADKDEFCRCELKLQKWYGDLRGKPFAIEAENSILDISGFSKQYNCAFIWQKDGVKKLNLYLIINYFKGGKLRFKKIKPEAFEANRFYTVINKKSGEIVPMEVNFNFDDPNLIILPLAFGKRQGREFIWNDLLSLETGSLKLANGRVIEKTLYNRRTRQDEPALFVALTFERREVLDSSNIKPMNLIGVDRGENIPAVIALTDPEGCPLSRFKDSLGNPTHILRIGESYKEKQRTIQAKKEVEQRRAGGYSRKYASKAKNLADDMVRNTARDLLYYAVTQDAMLIFENLSRGFGRQGKRTFMAERQYTRMEDWLTAKLAYEGLSKTYLSKTLAQYTSKTCSNCGFTITSADYDRVLEKLKKTATGWMTTINGKELKVEGQITYYNRYKRQNVVKDLSVELDRLSEESVNNDISSWTKGRSGEALSLLKKRFSHRPVQEKFVCLNCGFETHADEQAALNIARSWLFLRSQEYKKYQTNKTTGNTDKRAFVETWQSFYRKKLKEVWKPAV

SEQ ID NO: 22 - protein, 976 aa, synthetic construct
QEIKRINKIRRRLVKDSNTKKAGKTGPMKTLLVRVMTPDLRERLENLRKKPENIPQPISNTSRANLNKLLTDYTEMKKAILHVYWEEFQKDPVGLMSRVAQPAPKNIDQRKLIPVKDGNERLTSSGFACSQCCQPLYVYKLEQVNDKGKPHTNYFGRCNVSEHERLILLSPHKPEANDELVTYSLGKFGQRALDFYSIHVTKESTHPVKPLAQIAGNRYASGPVGKALSDACMGTIASFLSKYQDIIIEHQKVVKGNQKRLESLRELAGKENLEYPSVTLPPQPHTKEGVDAYNEVIARVRMWVNLNLWQKLKLSRDDAKPLLRLKGFPSFPLVERQANEVDWWDMVCNVKKLINEKKEDGKVFWQNLAGYKRQEALRPYLSSEEDRKKGKKFARYQLGDLLLHLEKKHGEDWGKVYDEAWERIDKKVEGLSKHIKLEEERRSEDAQSKAALTDWLRAKASFVIEGLKEADKDEFCRCELKLQKWYGDLRGKPFAIEAENSILDISGFSKQYNCAFIWQKDGVKKLNLYLIINYFKGGKLRFKKIKPEAFEANRFYTVINKKSGEIVPMEVNFNFDDPNLIILPLAFGKRQGREFIWNDLLSLETGSLKLANGRVIEKTLYNRRTRQDEPALFVALTFERREVLDSSNIKPMNLIGVDRGENIPAVIALTDPEGCPLSRFKDSLGNPTHILRIGESYKEKQRTIQAKKEVEQRRAGGYSRKYASKAKNLADDMVRNTARDLLYYAVTQDAMLIFENLSRGFGRQGKRTFMAERQYTRMEDWLTAKLAYEGLSKTYLSKTLAQYTSKTCSNCGFTITSADYDRVLEKLKKTATGWMTTINGKELKVEGQITYYNRRKRQNVVKDLSVELDRLSEESVNNDISSWTKGRSGEALSLLKKRFSHRPVQEKFVCLNCGFETHADEQAALNIARSWLFLRSQEYKKYQTNKTTGNTDKRAFVETWQSFYRKKLKEVWKPAV

SEQ ID NO: 23 - protein, 976 aa, synthetic construct
QEIKRINKIRRRLVKDSNTKKAGKTGPMKTLLVRVMTPDLRERLENLRKKPENIPQPISNTSRANLNKLLTDYTEMKKAILHVYWEEFQKDPVGLMSRVAQPAPKNIDQRKLIPVKDGNERLTSSGFACSQCCQPLYVYKLEQVNDKGKPHTNYFGRCNVSEHERLILLSPHKPEANDELVTYSLGKFGQRALDFYSIHVTKESTHPVKPLAQIAGNRYASGPVGKALSDACMGTIASFLSKYQDIIIEHQKVVKGNQKRLESLRELAGKENLEYPSVTLPPQPHTKEGVDAYNEVIARVRMWVNLNLWQKLKLSRDDAKPLLRLKGFPSFPLVERQANEVDWWDMVCNVKKLINEKKEDGKVFWQNLAGYKRQEALRPYLSSEEDRKKGKKFARYQLGDLLKHLEKKHGEDWGKVYDEAWERIDKKVEGLSKHIKLEEERRSEDAQSKAALTDWLRAKASFVIEGLKEADKDEFCRCELKLQKWYGDLRGKPFAIEAENSILDISGFSKQYNCAFIWQKDGVKKLNLYLIINYFKGGKLRFKKIKPEAFEANRFYTVINKKSGEIVPMEVNFNFDDPNLIILPLAFGKRQGREFIWNDLLSLETGSLKLANGRVIEKTLYNRRTRQDEPALFVALTFERREVLDSSNIKPMNLIGVDRGENIPAVIALTDPEGCPLSRFKDSLGNPTHILRIGESYKEKQRTIQAKKEVEQRRAGGYSRKYASKAKNLADDMVRNTARDLLYYAVTQDAMLIFENLSRGFGRQGKRTFMAERQYTRMEDWLTAKLAYEGLSKTYLSKTLAQYTSKTCSNCGFTITSADYDRVLEKLKKTATGWMTTINGKELKVEGQITYYNRRKRQNVVKDLSVELDRLSEESVNNDISSWTKGRSGEALSLLKKRFSHRPVQEKFVCLNCGFETHADEQAALNIARSWLFLRSQEYKKYQTNKTTGNTDKRAFVETWQSFYRKKLKEVWKPAV

SEQ ID NO: 24 - protein, 976 aa, synthetic construct
QEIKRINKIRRRLVKDSNTKKAGKTGPMKTLLVRVMTPDLRERLENLRKKPENIPQPISNTSRANLNKLLTDYTEMKKAILHVYWEEFQKDPVGLMSRVAQPAPKNIDQRKLIPVKDGNERLTSSGFACSQCCQPLYVYKLEQVNDKGKPHTNYFGRCNVSEHERLILLSPHKPEANDELVTYSLGKFGQRALDFYSIHVTKESTHPVKPLAQIAGNRYASGPVGKALSDACMGTIASFLSKYQDIIIEHQKVVKGNQKRLESLRELAGKENLEYPSVTLPPQPHTKEGVDAYNEVIARVRMWVNLNLWQKLKLSRDDAKPLLRLKGFPSFPLVERQANEVDWWDMVCNVKKLINEKKEDGKVFWQNLAGYKRQEALRPYLSSEEDRKKGKKFARYQLGDLLLHLEKKHGEDWGKVYDEAWERIDKKVEGLSKHIKLEEERRSEDAQSKAALTDWLRAKASFVIEGLKEADKDEFCRCELKLQKWYGDLRGKPFAIEAENSILDISGFSKQYNCAFIWQKDGVKKLNLYLIINYFKGGKLRFKKIKPEAFEANRFYTVINKKSGEIVPMEVNFNFDDPNLIILPLAFGKRQGREFIWNDLLSLETGSLKLANGRVIEKTLYNRRTRQDEPALFVALTFERREVLDSSNIKPMNLIGVDRGENIPAVIALTDPEGCPLSRFKDSLGNPTHILRIGESYKEKQRTIQAKKEVEQRRAGGYSRKYASKAKNLADDMVRNTARDLLYYAVTQDAMLIFENLSRGFGRQGKRTFMAERQYTRMEDWLTAKLAYEGLSKTYLSKTLAQYTSKTCSNCGFTITSADYDRVLEKLKKTATGWMTTINGKELKVEGQITYYNRYKRQNVVKDLSVELDRLSEESVNNDISSWTKGRSGEALSLLKKRFSHRPVQEKFVCLNCGFETHADEQAALNIARSWLFLRSQEYKKYQTNKTTGNTDKRAFVETWQSFYRKKLKEVWKPAV

SEQ ID NO: 25 - protein, 977 aa, synthetic construct
QEIKRINKIRRRLVKDSNTKKAGKTGPMKTLLVRVMTPDLRERLENLRKKPENIPQPISNTSRANLNKLLTDYTEMKKAILHVYWEEFQKDPVGLMSRVAQPASKKIDQNKLKPEMDEKGNLTTAGFACSQCGQPLFVYKLEQVSEKGKAYTNYFGRCNVAEHEKLILLAQLKPEKDSDEAVTYSLGKFGQRALDFYSIHVTKESTHPVKPLAQIAGNRYASGPVGKALSDACMGTIASFLSKYQDIIIEHQKVVKGNQKRLESLRELAGKENLEYPSVTLPPQPHTKEGVDAYNEVIARVRMWVNLNLWQKLKLSRDDAKPLLRLKGFPSFPLVERQANEVDWWDMVCNVKKLINEKKEDGKVFWQNLAGYKRQEALRPYLSSEEDRKKGKKFARYQFGDLLLHLEKKHGEDWGKVYDEAWERIDKKVEGLSKHIKLEEERRSEDAQSKAALTDWLRAKASFVIEGLKEADKDEFCRCELKLQKWYGDLRGKPFAIEAENSILDISGFSKQYNCAFIWQKDGVKKLNLYLIINYFKGGKLRFKKIKPEAFEANRFYTVINKKSGEIVPMEVNFNFDDPNLIILPLAFGKRQGREFIWNDLLSLETGSLKLANGRVIEKTLYNRRTRQDEPALFVALTFERREVLDSSNIKPMNLIGIDRGENIPAVIALTDPEGCPLSRFKDSLGNPTHILRIGESYKEKQRTIQAKKEVEQRRAGGYSRKYASKAKNLADDMVRNTARDLLYYAVTQDAMLIFENLSRGFGRQGKRTFMAERQYTRMEDWLTAKLAYEGLSKTYLSKTLAQYTSKTCSNCGFTITSADYDRVLEKLKKTATGWMTTINGKELKVEGQITYYNRYKRQNVVKDLSVELDRLSEESVNNDISSWTKGRSGEALSLLKKRFSHRPVQEKFVCLNCGFETHADEQAALNIARSWLFLRSQEYKKYQTNKTTGNTDKRAFVETWQSFYRKKLKEVWKPAV

SEQ ID NO: 26 - protein, 977 aa, synthetic construct
QEIKRINKIRRRLVKDSNTKKAGKTGPMKTLLVRVMTPDLRERLENLRKKPENIPQPISNTSRANLNKLLTDYTEMKKAILHVYWEEFQKDPVGLMSRVAQPASKKIDQNKLKPEMDEKGNLTTAGFACSQCGQPLFVYKLEQVSEKGKAYTNYFGRCNVAEHEKLILLAQLKPEKDSDEAVTYSLGKFGQRALDFYSIHVTKESTHPVKPLAQIAGNRYASGPVGKALSDACMGTIASFLSKYQDIIIEHQKVVKGNQKRLESLRELAGKENLEYPSVTLPPQPHTKEGVDAYNEVIARVRMWVNLNLWQKLKLSRDDAKPLLRLKGFPSFPLVERQANEVDWWDMVCNVKKLINEKKEDGKVFWQNLAGYKRQEALRPYLSSEEDRKKGKKFARYQLGDLLLHLEKKHGEDWGKVYDEAWERIDKKVEGLSKHIKLEEERRSEDAQSKAALTDWLRAKASFVIEGLKEADKDEFCRCELKLQKWYGDLRGKPFAIEAENSILDISGFSKQYNCAFIWQKDGVKKLNLYLIINYFKGGKLRFKKIKPEAFEANRFYTVINKKSGEIVPMEVNFNFDDPNLIILPLAFGKRQGREFIWNDLLSLETGSLKLANGRVIEKTLYNRRTRQDEPALFVALTFERREVLDSSNIKPMNLIGVDRGENIPAVIALTDPEGCPLSRFKDSLGNPTHILRIGESYKEKQRTIQAKKEVEQRRAGGYSRKYASKAKNLADDMVRNTARDLLYYAVTQDAMLIFENLSRGFGRQGKRTFMAERQYTRMEDWLTAKLAYEGLSKTYLSKTLAQYTSKTCSNCGFTITSADYDRVLEKLKKTATGWMTTINGKELKVEGQITYYNRRKRQNVVKDLSVELDRLSEESVNNDISSWTKGRSGEALSLLKKRFSHRPVQEKFVCLNCGFETHADEQAALNIARSWLFLRSQEYKKYQTNKTTGNTDKRAFVETWQSFYRKKLKEVWKPAV

SEQ ID NO: 27 - protein, 977 aa, synthetic construct
QEIKRINKIRRRLVKDSNTKKAGKTGPMKTLLVRVMTPDLRERLENLRKKPENIPQPISNTSRANLNKLLTDYTEMKKAILHVYWEEFQKDPVGLMSRVAQPASKKIDQNKLKPEMDEKGNLTTAGFACSQCGQPLFVYKLEQVSEKGKAYTNYFGRCNVAEHEKLILLAQLKPEKDSDEAVTYSLGKFGQRALDFYSIHVTKESTHPVKPLAQIAGNRYASGPVGKALSDACMGTIASFLSKYQDIIIEHQKVVKGNQKRLESLRELAGKENLEYPSVTLPPQPHTKEGVDAYNEVIARVRMWVNLNLWQKLKLSRDDAKPLLRLKGFPSFPLVERQANEVDWWDMVCNVKKLINEKKEDGKVFWQNLAGYKRQEALRPYLSSEEDRKKGKKFARYQLGDLLKHLEKKHGEDWGKVYDEAWERIDKKVEGLSKHIKLEEERRSEDAQSKAALTDWLRAKASFVIEGLKEADKDEFCRCELKLQKWYGDLRGKPFAIEAENSILDISGFSKQYNCAFIWQKDGVKKLNLYLIINYFKGGKLRFKKIKPEAFEANRFYTVINKKSGEIVPMEVNFNFDDPNLIILPLAFGKRQGREFIWNDLLSLETGSLKLANGRVIEKTLYNRRTRQDEPALFVALTFERREVLDSSNIKPMNLIGVDRGENIPAVIALTDPEGCPLSRFKDSLGNPTHILRIGESYKEKQRTIQAKKEVEQRRAGGYSRKYASKAKNLADDMVRNTARDLLYYAVTQDAMLIFENLSRGFGRQGKRTFMAERQYTRMEDWLTAKLAYEGLSKTYLSKTLAQYTSKTCSNCGFTITSADYDRVLEKLKKTATGWMTTINGKELKVEGQITYYNRRKRQNVVKDLSVELDRLSEESVNNDISSWTKGRSGEALSLLKKRFSHRPVQEKFVCLNCGFETHADEQAALNIARSWLFLRSQEYKKYQTNKTTGNTDKRAFVETWQSFYRKKLKEVWKPAV

SEQ ID NO: 28 - protein, 977 aa, synthetic construct
QEIKRINKIRRRLVKDSNTKKAGKTGPMKTLLVRVMTPDLRERLENLRKKPENIPQPISNTSRANLNKLLTDYTEMKKAILHVYWEEFQKDPVGLMSRVAQPASKKIDQNKLKPEMDEKGNLTTAGFACSQCGQPLFVYKLEQVSEKGKAYTNYFGRCNVAEHEKLILLAQLKPEKDSDEAVTYSLGKFGQRALDFYSIHVTRESNHPVKPLEQIGGNSCASGPVGKALSDACMGAVASFLTKYQDIILEHQKVIKKNEKRLANLKDIASANGLAFPKITLPPQPHTKEGIEAYNNVVAQIVIWVNLNLWQKLKIGRDEAKPLQRLKGFPSFPLVERQANEVDWWDMVCNVKKLINEKKEDGKVFWQNLAGYKRQEALRPYLSSEEDRKKGKKFARYQLGDLLLHLEKKHGEDWGKVYDEAWERIDKKVEGLSKHIKLEEERRSEDAQSKAALTDWLRAKASFVIEGLKEADKDEFCRCELKLQKWYGDLRGKPFAIEAENSILDISGFSKQYNCAFIWQKDGVKKLNLYLIINYFKGGKLRFKKIKPEAFEANRFYTVINKKSGEIVPMEVNFNFDDPNLIILPLAFGKRQGREFIWNDLLSLETGSLKLANGRVIEKTLYNRRTRQDEPALFVALTFERREVLDSSNIKPMNLIGVDRGENIPAVIALTDPEGCPLSRFKDSLGNPTHILRIGESYKEKQRTIQAKKEVEQRRAGGYSRKYASKAKNLADDMVRNTARDLLYYAVTQDAMLIFENLSRGFGRQGKRTFMAERQYTRMEDWLTAKLAYEGLSKTYLSKTLAQYTSKTCSNCGFTITSADYDRVLEKLKKTATGWMTTINGKELKVEGQITYYNRYKRQNVVKDLSVELDRLSEESVNNDISSWTKGRSGEALSLLKKRFSHRPVQEKFVCLNCGFETHADEQAALNIARSWLFLRSQEYKKYQTNKTTGNTDKRAFVETWQSFYRKKLKEVWKPAV

SEQ ID NO: 29 - protein, 978 aa, synthetic construct
QEIKRINKIRRRLVKDSNTKKAGKTGPMKTLLVRVMTPDLRERLENLRKKPENIPQPISNTSRANLNKLLTDYTEMKKAILHVYWEEFQKDPVGLMSRVAQPASKKIDQNKLKPEMDEKGNLTTAGFACSQCGQPLFVYKLEQVSEKGKAYTNYFGRCNVAEHEKLILLAQLKPEKDSDEAVTYSLGKFGQRALDFYSIHVTKESTHPVKPLAQIAGNRYASGPVGKALSDACMGTIASFLSKYQDIIIEHQKVVKGNQKRLESLRELAGKENLEYPSVTLPPQPHTKEGVDAYNEVIARVRMWVNLNLWQKLKLSRDDAKPLLRLKGFPSFPLVERQANEVDWWDMVCNVKKLINEKKEDGKVFWQNLAGYKRQEALRPYLSSEEDRKKGKKFARYQLGDLLLHLEKKHGEDWGKVYDEAWERIDKKVEGLSKHIKLEEERRSEDAQSKAALTDWLRAKASFVIEGLKEADKDEFCRCELKLQKWYGDLRGKPFAIEAENSILDISGFSKQYNCAFIWQKDGVKKLNLYLIINYFKGGKLRFKKIKPEAFEANRFYTVINKKSGEIVPMEVNFNFDDPNLIILPLAFGKRQGREFIWNDLLSLETGSLKLANGRVIEKTLYNRRTRQDEPALFVALTFERREVLDSSNIKPMNLIGVDRGENIPAVIALTDPEGCPLSRFKDSLGNPTHILRIGESYKEKQRTIQAKKEVEQRRAGGYSRKYASKAKNLADDMVRNTARDLLYYAVTQDAMLIFENLSRGFGRQGKRTFMAERQYTRMEDWLTAKLAYEGLSKTYLSKTLAQYTSKTCSNCGFTIHTSADYDRVLEKLKKTATGWMTTINGKELKVEGQITYYNRYKRQNVVKDLSVELDRLSEESVNNDISSWTKGRSGEALSLLKKRFSHRPVQEKFVCLNCGFETHADEQAALNIARSWLFLRSQEYKKYQTNKTTGNTDKRAFVETWQSFYRKKLKEVWKPAV

SEQ ID NO: 30 - protein, 977 aa, synthetic construct
QEIKRINKIRRRLVKDSNTKKAGKTGPMKTLLVRVMTPDLRERLENLRKKPENIPQPISNTSRANLNKLLTDYTEMKKAILHVYWEEFQKDPVGLMSRVAQPASKKIDQNKLKPEMDEKGNLTTAGFACSQCGQPLFVYKLEQVSEKGKAYTNYFGRCNVAEHEKLILLAQLKPEKDSDEAVTYSLGKFGQRALDFYSIHVTKESTHPVKPLAQIAGNRYASGPVGKALSDACMGTIASFLSKYQDIIIEHQKVVKGNQKRLESLRELAGKENLEYPSVTLPPQPHTKEGVDAYNEVIARVRMWVNHNLWQKLKLSRDDAKPLLRLKGFPSFPLVERQANEVDWWDMVCNVKKLINEKKEDGKVFWQNLAGYKRQEALRPYLSSEEDRKKGKKFARYQLGDLLLHLEKKHGEDWGKVYDEAWERIDKKVEGLSKHIKLEEERRSEDAQSKAALTDWLRAKASFVIEGLKEADKDEFCRCELKLQKWYGDLRGKPFAIEAENSILDISGFSKQYNCAFIWQKDGVKKLNLYLIINYFKGGKLRFKKIKPEAFEANRFYTVINKKSGEIVPMEVNFNFDDPNLIILPLAFGKRQGREFIWNDLLSLETGSLKLANGRVIEKTLYNRRTRQDEPALFVALTFERREVLDSSNIKPMNLIGVDRGENIPAVIALTDPEGCPLSRFKDSLGNPTHILRIGESYKEKQRTIQAKKEVEQRRAGGYSRKYASKAKNLADDMVRNTARDLLYYAVTQDAMLIFENLSRGFGRQGKRTFMAERQYTRMEDWLTAKLAYEGLSKTYLSKTLAQYTSKTCSNCGFTITSADYDRVLEKLKKTATGWMTTINGKELKVEGQITYYNRYKRQNVVKDLSVELDRLSEESVNNDISSWTKGRSGEALSLLKKRFSHRPVQEKFVCLNCGFETHADEQAALNIARSWLFLRSQEYKKYQTNKTTGNTDKRAFVETWQSFYRKKLKEVWKPAV

SEQ ID NO: 31 - protein, 978 aa, synthetic construct
QEIKRINKIRRRLVKDSNTKKAGKTGPMKTLLVRVMTPDLRERLENLRKKPENIPQPISNTSRANLNKLLTDYTEMKKAILHVYWEEFQKDPVGLMSRVAQPASKKIDQNKLKPEMDEKGNLTTAGFACSQCGQPLFVYKLEQVSEKGKAYTNYFGRCNVAEHEKLILLAQLKPEKDSDEAVTYSLGKFGQRALDFYSIHVTKESTHPVKPLAQIAGNRYASGAPVGKALSDACMGTIASFLSKYQDIIIEHQKVVKGNQKRLESLRELAGKENLEYPSVTLPPQPHTKEGVDAYNEVIARVRMWVNLNLWQKLKLSRDDAKPLLRLKGFPSFPLVERQANEVDWWDMVCNVKKLINEKKEDGKVFWQNLAGYKRQEALRPYLSSEEDRKKGKKFARYQLGDLLLHLEKKHGEDWGKVYDEAWERIDKKVEGLSKHIKLEEERRSEDAQSKAALTDWLRAKASFVIEGLKEADKDEFCRCELKLQKWYGDLRGKPFAIEAENSILDISGFSKQYNCAFIWQKDGVKKLNLYLIINYFKGGKLRFKKIKPEAFEANRFYTVINKKSGEIVPMEVNFNFDDPNLIILPLAFGKRQGREFIWNDLLSLETGSLKLANGRVIEKTLYNRRTRQDEPALFVALTFERREVLDSSNIKPMNLIGVDRGENIPAVIALTDPEGCPLSRFKDSLGNPTHILRIGESYKEKQRTIQAKKEVEQRRAGGYSRKYASKAKNLADDMVRNTARDLLYYAVTQDAMLIFENLSRGFGRQGKRTFMAERQYTRMEDWLTAKLAYEGLSKTYLSKTLAQYTSKTCSNCGFTITSADYDRVLEKLKKTATGWMTTINGKELKVEGQITYYNRYKRQNVVKDLSVELDRLSEESVNNDISSWTKGRSGEALSLLKKRFSHRPVQEKFVCLNCGFETHADEQAALNIARSWLFLRSQEYKKYQTNKTTGNTDKRAFVETWQSFYRKKLKEVWKPAV

SEQ ID NO: 32 - protein, 978 aa, synthetic construct
RQEIKRINKIRRRLVKDSNTKKAGKTGPMKTLLVRVMTPDLRERLENLRKKPENIPQPISNTSRANLNKLLTDYTEMKKAILHVYWEEFQKDPVGLMSRVAQPASKKIDQNKLKPEMDEKGNLTTAGFACSQCGQPLFVYKLEQVSEKGKAYTNYFGRCNVAEHEKLILLAQLKPEKDSDEAVTYSLGKFGQRALDFYSIHVTKESTHPVKPLAQIAGNRYASGPVGKALSDACMGTIASFLSKYQDIIIEHQKVVKGNQKRLESLRELAGKENLEYPSVTLPPQPHTKEGVDAYNEVIARVRMWVNLNLWQKLKLSRDDAKPLLRLKGFPSFPLVERQANEVDWWDMVCNVKKLINEKKEDGKVFWQNLAGYKRQEALRPYLSSEEDRKKGKKFARYQLGDLLLHLEKKHGEDWGKVYDEAWERIDKKVEGLSKHIKLEEERRSEDAQSKAALTDWLRAKASFVIEGLKEADKDEFCRCELKLQKWYGDLRGKPFAIEAENSILDISGFSKQYNCAFIWQKDGVKKLNLYLIINYFKGGKLRFKKIKPEAFEANRFYTVINKKSGEIVPMEVNFNFDDPNLIILPLAFGKRQGREFIWNDLLSLETGSLKLANGRVIEKTLYNRRTRQDEPALFVALTFERREVLDSSNIKPMNLIGVDRGENIPAVIALTDPEGCPLSRFKDSLGNPTHILRIGESYKEKQRTIQAKKEVEQRRAGGYSRKYASKAKNLADDMVRNTARDLLYYAVTQDAMLIFENLSRGFGRQGKRTFMAERQYTRMEDWLTAKLAYEGLSKTYLSKTLAQYTSKTCSNCGFTITSADYDRVLEKLKKTATGWMTTINGKELKVEGQITYYNRYKRQNVVKDLSVELDRLSEESVNNDISSWTKGRSGEALSLLKKRFSHRPVQEKFVCLNCGFETHADEQAALNIARSWLFLRSQEYKKYQTNKTTGNTDKRAFVETWQSFYRKKLKEVWKPAV

SEQ ID NO: 33 - protein, 978 aa, synthetic construct
QEIKRINKIRRRLVKDSNTKKAGKTGPMKTLLVRVMTPDLRERLENLRKKPENIPQPISNTSRANLNKLLTDYTEMKKAILHVYWEEFQKDPVGLMSRVAQPASKKIDQNKLKPEMDEKGNLTTAGFACSQCGQPLFVYKLEQVSEKGKAYTNYFGRCNVAEHEKLILLAQLKPEKDSDEAVTYSLGKFGQRALDFYSIHVTKESTHPVKPLAQIAGNRYASGPVGKALSDACMGTIASFLSKYQDIIIEHQKVVKGNQKRLESLRELAGKENLEYPSVTLPPQPHTKEGVDAYNEVIARVRMWVNLNLWQKLKLSRDDAKPLLRLKGFPSFPLVERQANEVDWWDMVCNVKKLINEKKEDGKVFWQNLAGYKRQEALRPYLSSEEDRKKGKKFARYQLGDLLLHLEKKHGEDWGKVYDEAWERIDKKVEGLSKHIKLEEERRSEDAQSKAALTDWLRAKASFVIEGLKEADKDEFCRCELKLQKWYGDLRGKPFAIEAENSILDISGFSKQYNCAFIWQKDGVKKLNLYLIINYFKGGKLRFKKIKPEAFEANRFYTVINKKSGEIVPMEVNFNFDDPNLIILPLAFGKRQGREFIWNDLLSLETGSLKLANGRVIEKTLYNRRTRQDEPALFVALTFERREVLDSSNIKPMNLIGVDRGENIPAVIALTDPEGCPLSRFKDSLGNPTHIQLRIGESYKEKQRTIQAKKEVEQRRAGGYSRKYASKAKNLADDMVRNTARDLLYYAVTQDAMLIFENLSRGFGRQGKRTFMAERQYTRMEDWLTAKLAYEGLSKTYLSKTLAQYTSKTCSNCGFTITSADYDRVLEKLKKTATGWMTTINGKELKVEGQITYYNRYKRQNVVKDLSVELDRLSEESVNNDISSWTKGRSGEALSLLKKRFSHRPVQEKFVCLNCGFETHADEQAALNIARSWLFLRSQEYKKYQTNKTTGNTDKRAFVETWQSFYRKKLKEVWKPAV

SEQ ID NO: 34 - protein, 977 aa, synthetic construct
QEIKRINKIRRRLVKDSNTKKAGKTGPMKTLLVRVMTPDLRERLENLRKKPENIPQPISNTSRANLNKLLTDYTEMKKAILHVYWEEFQKDPVGLMSRVAQPASKKIDQNKLKPEMDEKGNLTTAGFACSQCGQPLFVYKLEQVSEKGKAYTNYFGRCNVAEHEKLILLAQLKPEKDSDEAVTYSLGKFGQRALDFYSIHVTKESTHPVKPLAQIAGNRYASGPVGKALSDACMGTIASFLSKYQDIIIEHQKVVKGNQKRLESLRELAGKENLEYPSVTLPPQPHTKEGVDAYNEVIARVRMWVNLNLWQKLKLSRDDAKPLLRLKGFPSFPLVERQANEVDWWDMVCNVKKLINEKKEDGKVFWQNLAGYKRQEALRPYLSSEEDRKKGKKFARYQLGDLLLHLEKKHGEDWGKVYDEAWERIDKKVEGLSKHIKLEEERRSEDAQSKAALTDWLRAKASFVIEGLKEADKDEFCRCELKLQKWYGDLRGKPFAIEAENSILDISGFSKQYNCAFIWQKDGVKKLNLYLIINYFKGGKLRFKKIKPEAFEANRFYTVINKKSGEIVPMEVNFNFDDPNLIILPLAFGKRQGREFIWNDLLSLETGSLKLANGRVIEKTLYNRRTRQDEPALFVALTFERREVLDSSNIKPMNLIGVDRGENIPAVIALTDPEGCPLSRFKDSLGNPTHILRIGESYKEKQRTTQAKKEVEQRRAGGYSRKYASKAKNLADDMVRNTARDLLYYAVTQDAMLIFENLSRGFGRQGKRTFMAERQYTRMEDWLTAKLAYEGLSKTYLSKTLAQYTSKTCSNCGFTITSADYDRVLEKLKKTATGWMTTINGKELKVEGQITYYNRYKRQNVVKDLSVELDRLSEESVNNDISSWTKGRSGEALSLLKKRFSHRPVQEKFVCLNCGFETHADEQAALNIARSWLFLRSQEYKKYQTNKTTGNTDKRAFVETWQSFYRKKLKEVWKPAV

SEQ ID NO: 35 - protein, 977 aa, synthetic construct
QEIKRINKIRRRLVKDSNTKKAGKTGPMKTLLVRVMTPDLRERLENLRKKPENIPQPISNTSRANLNKLLTDYTEMKKAILHVYWEEFQKDPVGLMSRVAQPASKKIDQNKLKPEMDEKGNLTTAGFACSQCGQPLFVYKLEQVSEKGKAYTNYFGRCNVAEHEKLILLAQLKPEKDSDEAVTYSLGKFGQRALDFYSIHVTKESTHPVKPLAQIAGNRYASGPVGKALSDACMGTIASFLSKYQDIIIEHQKVVKGNQKRLESLRELAGKENLEYPSVTLPPQPHTKEGVDAYNEVIARVRMWVNLNLWQKLKLSRDDAKPLLRLKGFPSFPLVERQANEVDWWDMVCNVKKLINEKKEDGKVFWQNLAGYKRQEALRPYLSSEEDRKKGKKFARYQLGDLLLHLEKKHGEDWGKVYDEAWERIDKKVEGLSKHIKLEEERRSEDAQSKAALTDWLRAKASFVIEGLKEADKDEFCRCELKLQKWYGDLRGKPFAIEAENSILDISGFSKQYNCAFIWQKDGVKKLNLYLIINYFKGGKLRFKKIKPEAFEANRFYTVINKKSGEIVPMEVNFNFDDPNLIILPLAFGKRQGREFIWNDLLSLETGSLKLANGRVIEKTLYNRRTRQDEPALFVALTFERREVLDSSNIKPMNLIGVDRGENIPAVIALTDPEGCPLSRFKRSLGNPTHILRIGESYKEKQRTIQAKKEVEQRRAGGYSRKYASKAKNLADDMVRNTARDLLYYAVTQDAMLIFENLSRGFGRQGKRTFMAERQYTRMEDWLTAKLAYEGLSKTYLSKTLAQYTSKTCSNCGFTITSADYDRVLEKLKKTATGWMTTINGKELKVEGQITYYNRYKRQNVVKDLSVELDRLSEESVNNDISSWTKGRSGEALSLLKKRFSHRPVQEKFVCLNCGFETHADEQAALNIARSWLFLRSQEYKKYQTNKTTGNTDKRAFVETWQSFYRKKLKEVWKPAV

SEQ ID NO: 36 - protein, 977 aa, synthetic construct
QEIKRINKIRRRLVKDSNTKKAGKTYPMKTLLVRVMTPDLRERLENLRKKPENIPQPISNTSRANLNKLLTDYTEMKKAILHVYWEEFQKDPVGLMSRVAQPASKKIDQNKLKPEMDEKGNLTTAGFACSQCGQPLFVYKLEQVSEKGKAYTNYFGRCNVAEHEKLILLAQLKPEKDSDEAVTYSLGKFGQRALDFYSIHVTKESTHPVKPLAQIAGNRYASGPVGKALSDACMGTIASFLSKYQDIIIEHQKVVKGNQKRLESLRELAGKENLEYPSVTLPPQPHTKEGVDAYNEVIARVRMWVNLNLWQKLKLSRDDAKPLLRLKGFPSFPLVERQANEVDWWDMVCNVKKLINEKKEDGKVFWQNLAGYKRQEALRPYLSSEEDRKKGKKFARYQLGDLLLHLEKKHGEDWGKVYDEAWERIDKKVEGLSKHIKLEEERRSEDAQSKAALTDWLRAKASFVIEGLKEADKDEFCRCELKLQKWYGDLRGKPFAIEAENSILDISGFSKQYNCAFIWQKDGVKKLNLYLIINYFKGGKLRFKKIKPEAFEANRFYTVINKKSGEIVPMEVNFNFDDPNLIILPLAFGKRQGREFIWNDLLSLETGSLKLANGRVIEKTLYNRRTRQDEPALFVALTFERREVLDSSNIKPMNLIGVDRGENIPAVIALTDPEGCPLSRFKDSLGNPTHILRIGESYKEKQRTIQAKKEVEQRRAGGYSRKYASKAKNLADDMVRNTARDLLYYAVTQDAMLIFENLSRGFGRQGKRTFMAERQYTRMEDWLTAKLAYEGLSKTYLSKTLAQYTSKTCSNCGFTITSADYDRVLEKLKKTATGWMTTINGKELKVEGQITYYNRYKRQNVVKDLSVELDRLSEESVNNDISSWTKGRSGEALSLLKKRFSHRPVQEKFVCLNCGFETHADEQAALNIARSWLFLRSQEYKKYQTNKTTGNTDKRAFVETWQSFYRKKLKEVWKPAV

SEQ ID NO: 37 - protein, 977 aa, synthetic construct
QEIKRINKIRRRLVKDSNTKKAGKTGPMKTLLVRVMTPDLRERLENLRKKPENIPQPISNTSRANLNKLLTDYTEMKKAILHVYWEEFQKDPVGLMSRVAQPASKKIDQNKLKPEMDEKGNLTTAGFACSQCGQPLFVYKLEQVSEKGKAYTNYFGRCNVAEHEKLILLAQLKPEKDSDEAVTYSLGKFGQRALDFYSIHVTKESTHPVKPLAQIAGNRYASGPVGKALSDACMGTIASFLSKYQDIIIEHQKVVKGNQKRLESLRELAGKENLEYPSVTLPPQPHTKEGVDAYNEVIARVRMWVNLNLWQKLKLSRDDAKPLLRLKGFPSFPLVERQANEVDWWDMVCNVKKLINEKKEDGKVFWQNLAGYKRQEALRPYLSSEEDRKKGKKFARYQLGDLLLHLEKKHGEDWGKVYDEAWERIDKKVEGLSKHIKLEEERRSEDAQSKAALTDWLRAKASFVIEGLKEADKDEFCRCELKLQKWYGDLRGKPFAIEAENSILDISGFSKQYNCAFIWQKDGVKKLNLYLIINYFKGGKLRFKKIKPEAFEANRFYTVINKKSGEIVPMEVNFNFDDPNLIILPLAFGKRQGREFIWNDLLSLETGSLKLANGRVIEKTLYNRRTRQDEPALFVALTFERREVLDSSNIKPMNLIGVDRGENIPAVIALTDPEGCPLSRFKDSLGNPTHILRIGESYKEKQRTIQAKKEVEQRRAGGYSRKYASKAKNLADDMVRNTARDLLYYAVTQDAMLIFENLSRGFGRQGKRTFMAERQYTRMEDWLTAKLAYEGLSKTYLSKTLAQYTSKTCSNCGFTIHSADYDRVLEKLKKTATGWMTTINGKELKVEGQITYYNRYKRQNVVKDLSVELDRLSEESVNNDISSWTKGRSGEALSLLKKRFSHRPVQEKFVCLNCGFETHADEQAALNIARSWLFLRSQEYKKYQTNKTTGNTDKRAFVETWQSFYRKKLKEVWKPAV

SEQ ID NO: 38 - protein, 977 aa, synthetic construct
QEIKRINKIRRRLVKDSNTKKAGKTGPMKTLLVRVMTPDLRERLENLRKKPENIPQPISNTSRANLNKLLTDYTEMKKAILHVYWEEFQKDPVGLMSRVAQPASKKIDQNKLKPEMDEKGNLTTAGFACSQCGQPLFVYKLEQVSEKGKAYTNYFGRCNVAEHEKLILLAQLKPEKDSDEAVTYSLGKFGQRALDFYSIHVTKESTHPVKPLAQIAGNRYASGPVGKALSDACMGTIASFLSKYQDIIIEHQKVVKGNQKRLESLRELAGKENLEYPSVTLPPQPHTKEGVDAYNEVIARVRMWVNLNLWQKLKLSRDDAKPLLRLKGFPSFPLVERQANEVDWWDMVCNVKKLINEKKEDGKVFWQNLAGYKRQEALRPYLSSEEDRKKGKKFARYQLGDLLLHLEKKHGEDWGKVYDEAWERIDKKVEGLSKHIKLEEERRSEDAQSKAALTDWLRAKASFVIEGLKEADKDEFCRCELKLQKWYGDLRGKPFAIEAENSILDISGFSKQYNCAFIWQKDGVKKLNLYLIINYFKGGKLRFKKIKPEAFEANRFYTVINKKSGEIVPMEVNFNFDDPNLIILPLAFGKRQGREFIWNDLLSLETGSLKLANGRVIEKTLYNRRTRQDEPALFVALTFERREVLDSSNIKPMNLIGVDRGENIPAVIALTDPEGCPLSRFKDSLGNPTHILRIGESYKEKQRTIQAKKEVEQRRAGGYSRKYASKAKNLADDMVRNTARDLLYYAATQDAMLIFENLSRGFGRQGKRTFMAERQYTRMEDWLTAKLAYEGLSKTYLSKTLAQYTSKTCSNCGFTITSADYDRVLEKLKKTATGWMTTINGKELKVEGQITYYNRYKRQNVVKDLSVELDRLSEESVNNDISSWTKGRSGEALSLLKKRFSHRPVQEKFVCLNCGFETHADEQAALNIARSWLFLRSQEYKKYQTNKTTGNTDKRAFVETWQSFYRKKLKEVWKPAV

SEQ ID NO: 39 - protein, 977 aa, synthetic construct
QEIKRINKIRRRLVKDSNTKKAGKTGPMKTLLVRVMTPDLRERLENLRKKPENIPQPISNTSRANLNKLLTDYTEMKKAILHVYWEEFQKDPVGLMSRVAQPASKKIDQNKLKPEMDEKGNLTTAGFACSQCGQPLFVYKLEQVSEKGKAYTNYFGRCNVAEHEKLILLAQLKPEKDSDEAVTYSLGKFGQRALDFYSIHVTKESTHPVKPLAQIAGNRYASGPVGKALSDACMGTIASFLSKYQDIIIEHQKVVKGNQKRLESLRELAGKENLEYPSVTLPPQPHTKEGVDAYNEVIARVRMWVNLNLWQKLKLSRDDAKPLLRLKGFPSFPLVERQANEVDWWDMVCNVKKLINEKKEDGKVFWQNLAGYKRQEALRPYLSSEEDRKKGKKFARYQLGDLLLHLEKKHGEDWGKVYDEAWERIDKKVEGLSKHIKLEEERRSEDAQSKAALTDWLRAKASFVIEGLKEADKDEFCRCELKLQKWYGDLRGKPFAIEAENSILDISGFSKQYNCAFIWQKDGVKKLNLYLIINYFKGGKLRFKKIKPEAFEANRFYTVINKKSGEIVPMEVNFNFDDPNLIILPLAFGKRQGREFIWNDLLSLETGSLKLANGRVIEKTLYNRRTRQDEPALFVALTFERREVLDSSNIKPMNLIGVDRGENIPAVIALTDPEGCPLSRFKDSLGNPTHILRIGESYKEKQRTIQAAKEVEQRRAGGYSRKYASKAKNLADDMVRNTARDLLYYAVTQDAMLIFENLSRGFGRQGKRTFMAERQYTRMEDWLTAKLAYEGLSKTYLSKTLAQYTSKTCSNCGFTITSADYDRVLEKLKKTATGWMTTINGKELKVEGQITYYNRYKRQNVVKDLSVELDRLSEESVNNDISSWTKGRSGEALSLLKKRFSHRPVQEKFVCLNCGFETHADEQAALNIARSWLFLRSQEYKKYQTNKTTGNTDKRAFVETWQSFYRKKLKEVWKPAV

SEQ ID NO: 40 - protein, 978 aa, synthetic construct
QEIKRINKIRRRLVKDSNTKKAGKTRGPMKTLLVRVMTPDLRERLENLRKKPENIPQPISNTSRANLNKLLTDYTEMKKAILHVYWEEFQKDPVGLMSRVAQPASKKIDQNKLKPEMDEKGNLTTAGFACSQCGQPLFVYKLEQVSEKGKAYTNYFGRCNVAEHEKLILLAQLKPEKDSDEAVTYSLGKFGQRALDFYSIHVTKESTHPVKPLAQIAGNRYASGPVGKALSDACMGTIASFLSKYQDIIIEHQKVVKGNQKRLESLRELAGKENLEYPSVTLPPQPHTKEGVDAYNEVIARVRMWVNLNLWQKLKLSRDDAKPLLRLKGFPSFPLVERQANEVDWWDMVCNVKKLINEKKEDGKVFWQNLAGYKRQEALRPYLSSEEDRKKGKKFARYQLGDLLLHLEKKHGEDWGKVYDEAWERIDKKVEGLSKHIKLEEERRSEDAQSKAALTDWLRAKASFVIEGLKEADKDEFCRCELKLQKWYGDLRGKPFAIEAENSILDISGFSKQYNCAFIWQKDGVKKLNLYLIINYFKGGKLRFKKIKPEAFEANRFYTVINKKSGEIVPMEVNFNFDDPNLIILPLAFGKRQGREFIWNDLLSLETGSLKLANGRVIEKTLYNRRTRQDEPALFVALTFERREVLDSSNIKPMNLIGVDRGENIPAVIALTDPEGCPLSRFKDSLGNPTHILRIGESYKEKQRTIQAKKEVEQRRAGGYSRKYASKAKNLADDMVRNTARDLLYYAVTQDAMLIFENLSRGFGRQGKRTFMAERQYTRMEDWLTAKLAYEGLSKTYLSKTLAQYTSKTCSNCGFTITSADYDRVLEKLKKTATGWMTTINGKELKVEGQITYYNRYKRQNVVKDLSVELDRLSEESVNNDISSWTKGRSGEALSLLKKRFSHRPVQEKFVCLNCGFETHADEQAALNIARSWLFLRSQEYKKYQTNKTTGNTDKRAFVETWQSFYRKKLKEVWKPAV

SEQ ID NO: 41 - protein, 978 aa, synthetic construct
QEIKRINKIRRRLVKDSNTKKAGKTGPMKTLLVRVMTPDLRERLENLRKKPENIPQPISNTSRANLNKLLTDYTEMKKAILHVYWEEFQKDPVGLMSRVAQPASKKIDQNKLKPEMDEKGNLTTAGFACSQCGQPLFVYKLEQVSEKGKAYTNYFGRCNVAEHEKLILLAQLKPEKDSDEAVTYSLGKFGQRALDFYSIHVTKESTHPVKPLAQIAGNRYASYPVGKALSDACMGTIASFLSKYQDIIIEHQKVVKGNQKRLESLRELAGKENLEYPSVTLPPQPHTKEGVDAYNEVIARVRMWVNLNLWQKLKLSRDDAKPLLRLKGFPSFPLVERQANEVDWWDMVCNVKKLINEKKEDGKVFWQNLAGYKRQEALRPYLSSEEDRKKGKKFARYQLGDLLLHLEKKHGEDWGKVYDEAWERIDKKVEGLSKHIKLEEERRSEDAQSKAALTDWLRAKASFVIEGLKEADKDEFCRCELKLQKWYGDLRGKPFAIEAENSILDISGFSKQYNCAFIWQKDGVKKLNLYLIINYFKGGKLRFKKIKPEAFEANRFYTVINKKSGEIVPMEVNFNFDDPNLIILPLAFGKRQGREFIWNDLLSLETGSLKLANGRVIEKTLYNRRTRQDEPALFVALTFERREVLDSSNIKPMNLIGVDRGENIPAVIALTDPEGCPLSRFKDSLGNPTHILRIGESYKEKQRTIQAKKEVEQRRAGGYSRKYASKAKNLADDMVRNTARDLLYYAVTQDAMLIFENLSRGFGRQGKRTFMAERQYTRMEDWLTAKLAYEGLPSKTYLSKTLAQYTSKTCSNCGFTITSADYDRVLEKLKKTATGWMTTINGKELKVEGQITYYNRYKRQNVVKDLSVELDRLSEESVNNDISSWTKGRSGEALSLLKKRFSHRPVQEKFVCLNCGFETHADEQAALNIARSWLFLRSQEYKKYQTNKTTGNTDKRAFVETWQSFYRKKLKEVWKPAV

SEQ ID NO: 42 - protein, 978 aa, synthetic construct
QEIKRINKIRRRLVKDSNTKKAGKTGPMKTLLVRVMTPDLRERLENLRKKPENIPQPISNTSRANLNKLLTDYTEMKKAILHVYWEEFQKDPVGLMSRVAQPASKKIDQNKLKPEMDEKGNLTTAGFACSQCGQPLFVYKLEQVSEKGKAYTNYFGRCNVAEHEKLILLAQLKPEKDSDEAVTYSLGKFGQRALDFYSIHVTKESTHPVKPLAQIAGNRYASNPVGKALSDACMGTIASFLSKYQDIIIEHQKVVKGNQKRLESLRELAGKENLEYPSVTLPPQPHTKEGVDAYNEVIARVRMWVNLNLWQKLKLSRDDAKPLLRLKGFPSFPLVERQANEVDWWDMVCNVKKLINEKKEDGKVFWQNLAGYKRQEALRPYLSSEEDRKKGKKFARYQLGDLLLHLEKKHGEDWGKVYDEAWERIDKKVEGLSKHIKLEEERRSEDAQSKAALTDWLRAKASFVIEGLKEADKDEFCRCELKLQKWYGDLRGKPFAIEAENSILDISGFSKQYNCAFIWQKDGVKKLNLYLIINYFKGGKLRFKKIKPEAFEANRFYTVINKKSGEIVPMEVNFNFDDPNLIILPLAFGKRQGREFIWNDLLSLETGSLKLANGRVIEKTLYNRRTRQDEPALFVALTFERREVLDSSNIKPMNLIGVDRGENIPAVIALTDPEGCPLSRFKDSLGNPTHILRIGESYKEKQRTIQAKKEVEQRRAGGYSRKYASKAKNLADDMVRNTARDLLYYAVTQDAMLIFENLSRGFGRQGKRTFMAERQYTRMEDWLTAKLAYEGLPSKTYLSKTLAQYTSKTCSNCGFTITSADYDRVLEKLKKTATGWMTTINGKELKVEGQITYYNRYKRQNVVKDLSVELDRLSEESVNNDISSWTKGRSGEALSLLKKRFSHRPVQEKFVCLNCGFETHADEQAALNIARSWLFLRSQEYKKYQTNKTTGNTDKRAFVETWQSFYRKKLKEVWKPAV

SEQ ID NO: 43 - protein, 979 aa, synthetic construct
QEIKRINKIRRRLVKDSNTKKAGKTGPMKTLLVRVMTPDLRERLENLRKKPENIPQPISNTSRANLNKLLTDYTEMKKAILHVYWEEFQKDPVGLMSRVAQPASKKIDQNKLKPEMDEKGNLTTAGFACSQCGQPLFVYKLEQVSEKGKAYTNYFGRCNVAEHEKLILLAQLKPEKDSDEAVTYSLGKFGQRALDFYSIHVTKESTHPVKPLAQIAGNRYASGPVGKALSDACMGTIASFLSKYQDIIIEHQKVVKGNQKRLESLRELAGKENLEYPSVTLPPQPHTKEGVDAYNEVIARVRMWVNLNLWQKLKLSRDDAKPLLRLKGFPSFPLVERQANEVDWWDMVCNVKKLINEKKEDGKVFWQNLAGYKRQEALRPYLSSEEDRKKGKKFARYQLGDLLLHLEKKHGEDWGKVYDEAWERIDKKVEGLSKHIKLEEERRSEDAQSKAALTDWLRAKASFVIEGLKEADKDEFCRCELKLQKWYGDLRGKPFAIEAENSILDISGFSKQYNCAFIWQKDGVKKLNLYLIINYFKGWGKLRFKKIKPEAFEANRFYTVINKKSGEIVPMEVNFNFDDPNLIILPLAFGKRQGREFIWNDLLSLETGSLKLANGRVIEKTLYNRRTRQDEPALFVALTFERREVLDSSNIKPMNLIGVDRGENIPAVIALTDPEGCPLSRFKDSLGNPTHILRIGESYKEKQRTIQAKKEVEQRRAGGYSRKYASKAKNLADDMVRNTARDLLYYAVTQDAMLIFENLSRGFGRQGKRTFMAERQYTRMEDWLTAKLAYEGLPSKTYLSKTLAQYTSKTCSNCGFTITSADYDRVLEKLKKTATGWMTTINGKELKVEGQITYYNRYKRQNVVKDLSVELDRLSEESVNNDISSWTKGRSGEALSLLKKRFSHRPVQEKFVCLNCGFETHADEQAALNIARSWLFLRSQEYKKYQTNKTTGNTDKRAFVETWQSFYRKKLKEVWKPAV

SEQ ID NO: 44 - protein, 979 aa, synthetic construct
QEIKRINKIRRRLVKDSNTKKAGKTGPMKTLLVRVMTPDLRERLENLRKKPENIPQPISNTSRANLNKLLTDYTEMKKAILHVYWEEFQKDPVGLMSRVAQPASKKIDQNKLKPEMDEKGNLTTAGFACSQCGQPLFVYKLEQVSEKGKAYTNYFGRCNVAEHEKLILLAQLKPEKDSDEAVTYSLGKFGQRALDFYSIHVTKESTHPVKPLAQIAGNRYASGPVGKALSDACMGTIASFLSKYQDIIIEHQKVVKGNQKRLESLRELAGKENLEYPSVTLPPQPHTKEGVDAYNEVIARVRMWVNLNLWQKLKLSRDDAKPLLRLKGFPSFPLVERQANEVDWWDMVCNVKKLINEKKEDGKVFWQNLAGYKRQEALRPYLSSEEDRKKGKKFARYQLGDLLLHLEKKHGEDWGKVYDEAWERIDKKVEGLSKHIKLEEERRSEDAQSKAALTDWLRAKASFVIEGLKEADKDEFCRCELKLQKWYGDLRGKPFAIEAENSILDISGFSKQYNCAFIWQKDGVKKLNLYLIINYFKGYGKLRFKKIKPEAFEANRFYTVINKKSGEIVPMEVNFNFDDPNLIILPLAFGKRQGREFIWNDLLSLETGSLKLANGRVIEKTLYNRRTRQDEPALFVALTFERREVLDSSNIKPMNLIGVDRGENIPAVIALTDPEGCPLSRFKDSLGNPTHILRIGESYKEKQRTIQAKKEVEQRRAGGYSRKYASKAKNLADDMVRNTARDLLYYAVTQDAMLIFENLSRGFGRQGKRTFMAERQYTRMEDWLTAKLAYEGLPSKTYLSKTLAQYTSKTCSNCGFTITSADYDRVLEKLKKTATGWMTTINGKELKVEGQITYYNRYKRQNVVKDLSVELDRLSEESVNNDISSWTKGRSGEALSLLKKRFSHRPVQEKFVCLNCGFETHADEQAALNIARSWLFLRSQEYKKYQTNKTTGNTDKRAFVETWQSFYRKKLKEVWKPAV

SEQ ID NO: 45 - protein, 979 aa, synthetic construct
QEIKRINKIRRRLVKDSNTKKAGKTRGPMKTLLVRVMTPDLRERLENLRKKPENIPQPISNTSRANLNKLLTDYTEMKKAILHVYWEEFQKDPVGLMSRVAQPASKKIDQNKLKPEMDEKGNLTTAGFACSQCGQPLFVYKLEQVSEKGKAYTNYFGRCNVAEHEKLILLAQLKPEKDSDEAVTYSLGKFGQRALDFYSIHVTKESTHPVKPLAQIAGNRYASGPVGKALSDACMGTIASFLSKYQDIIIEHQKVVKGNQKRLESLRELAGKENLEYPSVTLPPQPHTKEGVDAYNEVIARVRMWVNLNLWQKLKLSRDDAKPLLRLKGFPSFPLVERQANEVDWWDMVCNVKKLINEKKEDGKVFWQNLAGYKRQEALRPYLSSEEDRKKGKKFARYQLGDLLLHLEKKHGEDWGKVYDEAWERIDKKVEGLSKHIKLEEERRSEDAQSKAALTDWLRAKASFVIEGLKEADKDEFCRCELKLQKWYGDLRGKPFAIEAENSILDISGFSKQYNCAFIWQKDGVKKLNLYLIINYFKGGKLRFKKIKPEAFEANRFYTVINKKSGEIVPMEVNFNFDDPNLIILPLAFGKRQGREFIWNDLLSLETGSLKLANGRVIEKTLYNRRTRQDEPALFVALTFERREVLDSSNIKPMNLIGVDRGENIPAVIALTDPEGCPLSRFKDSLGNPTHILRIGESYKEKQRTIQAKKEVEQRRAGGYSRKYASKAKNLADDMVRNTARDLLYYAVTQDAMLIFENLSRGFGRQGKRTFMAERQYTRMEDWLTAKLAYEGLPSKTYLSKTLAQYTSKTCSNCGFTITSADYDRVLEKLKKTATGWMTTINGKELKVEGQITYYNRYKRQNVVKDLSVELDRLSEESVNNDISSWTKGRSGEALSLLKKRFSHRPVQEKFVCLNCGFETHADEQAALNIARSWLFLRSQEYKKYQTNKTTGNTDKRAFVETWQSFYRKKLKEVWKPAV

SEQ ID NO: 46 - protein, 979 aa, synthetic construct
QEIKRINKIRRRLVKDSNTKKAGKTRGPMKTLLVRVMTPDLRERLENLRKKPENIPQPISNTSRANLNKLLTDYTEMKKAILHVYWEEFQKDPVGLMSRVAQPASKKIDQNKLKPEMDEKGNLTTAGFACSQCGQPLFVYKLEQVSEKGKAYTNYFGRCNVAEHEKLILLAQLKPEKDSDEAVTYSLGKFGQRALDFYSIHVTKESTHPVKPLAQIAGNRYASYPVGKALSDACMGTIASFLSKYQDIIIEHQKVVKGNQKRLESLRELAGKENLEYPSVTLPPQPHTKEGVDAYNEVIARVRMWVNLNLWQKLKLSRDDAKPLLRLKGFPSFPLVERQANEVDWWDMVCNVKKLINEKKEDGKVFWQNLAGYKRQEALRPYLSSEEDRKKGKKFARYQLGDLLLHLEKKHGEDWGKVYDEAWERIDKKVEGLSKHIKLEEERRSEDAQSKAALTDWLRAKASFVIEGLKEADKDEFCRCELKLQKWYGDLRGKPFAIEAENSILDISGFSKQYNCAFIWQKDGVKKLNLYLIINYFKGGKLRFKKIKPEAFEANRFYTVINKKSGEIVPMEVNFNFDDPNLIILPLAFGKRQGREFIWNDLLSLETGSLKLANGRVIEKTLYNRRTRQDEPALFVALTFERREVLDSSNIKPMNLIGVDRGENIPAVIALTDPEGCPLSRFKDSLGNPTHILRIGESYKEKQRTIQAKKEVEQRRAGGYSRKYASKAKNLADDMVRNTARDLLYYAVTQDAMLIFENLSRGFGRQGKRTFMAERQYTRMEDWLTAKLAYEGLPSKTYLSKTLAQYTSKTCSNCGFTITSADYDRVLEKLKKTATGWMTTINGKELKVEGQITYYNRYKRQNVVKDLSVELDRLSEESVNNDISSWTKGRSGEALSLLKKRFSHRPVQEKFVCLNCGFETHADEQAALNIARSWLFLRSQEYKKYQTNKTTGNTDKRAFVETWQSFYRKKLKEVWKPAV

SEQ ID NO: 47 - protein, 978 aa, synthetic construct
QEIKRINKIRRRLVKDSNTKKAGKTGPMKTLLVRVMTPDLRERLENLRKKPENIPQPISNTSRANLNKLLTDYTEMKKAILHVYWEEFQKDPVGLMSRVAQPASKKIDQNKLKPEMDEKGNLTTAGFACSQCGQPLFVYKLEQVSEKGKAYTNYFGRCNVAEHEKLILLAQLKPEKDSDEAVTYSLGKFGQRALDFYSIHVTKESTHPVKPLAQIAGNRYASHPVGKALSDACMGTIASFLSKYQDIIIEHQKVVKGNQKRLESLRELAGKENLEYPSVTLPPQPHTKEGVDAYNEVIARVRMWVNLNLWQKLKLSRDDAKPLLRLKGFPSFPLVERQANEVDWWDMVCNVKKLINEKKEDGKVFWQNLAGYKRQEALRPYLSSEEDRKKGKKFARYQLGDLLLHLEKKHGEDWGKVYDEAWERIDKKVEGLSKHIKLEEERRSEDAQSKAALTDWLRAKASFVIEGLKEADKDEFCRCELKLQKWYGDLRGKPFAIEAENSILDISGFSKQYNCAFIWQKDGVKKLNLYLIINYFKGGKLRFKKIKPEAFEANRFYTVINKKSGEIVPMEVNFNFDDPNLIILPLAFGKRQGREFIWNDLLSLETGSLKLANGRVIEKTLYNRRTRQDEPALFVALTFERREVLDSSNIKPMNLIGVDRGENIPAVIALTDPEGCPLSRFKDSLGNPTHILRIGESYKEKQRTIQAKKEVEQRRAGGYSRKYASKAKNLADDMVRNTARDLLYYAVTQDAMLIFENLSRGFGRQGKRTFMAERQYTRMEDWLTAKLAYEGLPSKTYLSKTLAQYTSKTCSNCGFTITSADYDRVLEKLKKTATGWMTTINGKELKVEGQITYYNRYKRQNVVKDLSVELDRLSEESVNNDISSWTKGRSGEALSLLKKRFSHRPVQEKFVCLNCGFETHADEQAALNIARSWLFLRSQEYKKYQTNKTTGNTDKRAFVETWQSFYRKKLKEVWKPAV

SEQ ID NO: 48 - protein, 978 aa, synthetic construct
QEIKRINKIRRRLVKDSNTKKAGKTGPMKTLLVRVMTPDLRERLENLRKKPENIPQPISNTSRANLNKLLTDYTEMKKAILHVYWEEFQKDPVGLMSRVAQPASKKIDQNKLKPEMDEKGNLTTAGFACSQCGQPLFVYKLEQVSEKGKAYTNYFGRCNVAEHEKLILLAQLKPEKDSDEAVTYSLGKFGQRALDFYSIHVTKESTHPVKPLAQIAGNRYASSPVGKALSDACMGTIASFLSKYQDIIIEHQKVVKGNQKRLESLRELAGKENLEYPSVTLPPQPHTKEGVDAYNEVIARVRMWVNLNLWQKLKLSRDDAKPLLRLKGFPSFPLVERQANEVDWWDMVCNVKKLINEKKEDGKVFWQNLAGYKRQEALRPYLSSEEDRKKGKKFARYQLGDLLLHLEKKHGEDWGKVYDEAWERIDKKVEGLSKHIKLEEERRSEDAQSKAALTDWLRAKASFVIEGLKEADKDEFCRCELKLQKWYGDLRGKPFAIEAENSILDISGFSKQYNCAFIWQKDGVKKLNLYLIINYFKGGKLRFKKIKPEAFEANRFYTVINKKSGEIVPMEVNFNFDDPNLIILPLAFGKRQGREFIWNDLLSLETGSLKLANGRVIEKTLYNRRTRQDEPALFVALTFERREVLDSSNIKPMNLIGVDRGENIPAVIALTDPEGCPLSRFKDSLGNPTHILRIGESYKEKQRTIQAKKEVEQRRAGGYSRKYASKAKNLADDMVRNTARDLLYYAVTQDAMLIFENLSRGFGRQGKRTFMAERQYTRMEDWLTAKLAYEGLPSKTYLSKTLAQYTSKTCSNCGFTITSADYDRVLEKLKKTATGWMTTINGKELKVEGQITYYNRYKRQNVVKDLSVELDRLSEESVNNDISSWTKGRSGEALSLLKKRFSHRPVQEKFVCLNCGFETHADEQAALNIARSWLFLRSQEYKKYQTNKTTGNTDKRAFVETWQSFYRKKLKEVWKPAV

SEQ ID NO: 49 - protein, 978 aa, synthetic construct
QEIKRINKIRRRLVKDSNTKKAGKTGPMKTLLVRVMTPDLRERLENLRKKPENIPQPISNTSRANLNKLLTDYTEMKKAILHVYWEEFQKDPVGLMSRVAQPASKKIDQNKLKPEMDEKGNLTTAGFACSQCGQPLFVYKLEQVSEKGKAYTNYFGRCNVAEHEKLILLAQLKPEKDSDEAVTYSLGKFGQRALDFYSIHVTKESTHPVKPLAQIAGNRYASTPVGKALSDACMGTIASFLSKYQDIIIEHQKVVKGNQKRLESLRELAGKENLEYPSVTLPPQPHTKEGVDAYNEVIARVRMWVNLNLWQKLKLSRDDAKPLLRLKGFPSFPLVERQANEVDWWDMVCNVKKLINEKKEDGKVFWQNLAGYKRQEALRPYLSSEEDRKKGKKFARYQLGDLLLHLEKKHGEDWGKVYDEAWERIDKKVEGLSKHIKLEEERRSEDAQSKAALTDWLRAKASFVIEGLKEADKDEFCRCELKLQKWYGDLRGKPFAIEAENSILDISGFSKQYNCAFIWQKDGVKKLNLYLIINYFKGGKLRFKKIKPEAFEANRFYTVINKKSGEIVPMEVNFNFDDPNLIILPLAFGKRQGREFIWNDLLSLETGSLKLANGRVIEKTLYNRRTRQDEPALFVALTFERREVLDSSNIKPMNLIGVDRGENIPAVIALTDPEGCPLSRFKDSLGNPTHILRIGESYKEKQRTIQAKKEVEQRRAGGYSRKYASKAKNLADDMVRNTARDLLYYAVTQDAMLIFENLSRGFGRQGKRTFMAERQYTRMEDWLTAKLAYEGLPSKTYLSKTLAQYTSKTCSNCGFTITSADYDRVLEKLKKTATGWMTTINGKELKVEGQITYYNRYKRQNVVKDLSVELDRLSEESVNNDISSWTKGRSGEALSLLKKRFSHRPVQEKFVCLNCGFETHADEQAALNIARSWLFLRSQEYKKYQTNKTTGNTDKRAFVETWQSFYRKKLKEVWKPAV

SEQ ID NO: 50 - protein, 978 aa, synthetic construct
QEIKRINKIRRRLVKDSNTKKAGKTGPMKTLLVRVMTPDLRERLENLRKKPENIPQPISNTSRANLNKLLTDYTEMKKAILHVYWEEFQKDPVGLMSRVAQPASKKIDQNKLKPEMDEKGNLTTAGFACSQCGQPLFVYKLEQVSEKGKAYTNYFGRCNVAEHEKLILLAQLKPEKDSDEAVTYSLGKFGQRALDFYSIHVTKESTHPVKPLAQIAGNRYASAPVGKALSDACMGTIASFLSKYQDIIIEHQKVVKGNQKRLESLRELAGKENLEYPSVTLPPQPHTKEGVDAYNEVIARVRMWVNLNLWQKLKLSRDDAKPLLRLKGFPSFPLVERQANEVDWWDMVCNVKKLINEKKEDGKVFWQNLAGYKRQEALRPYLSSEEDRKKGKKFARYQLGDLLLHLEKKHGEDWGKVYDEAWERIDKKVEGLSKHIKLEEERRSEDAQSKAALTDWLRAKASFVIEGLKEADKDEFCRCELKLQKWYGDLRGKPFAIEAENSILDISGFSKQYNCAFIWQKDGVKKLNLYLIINYFKGGKLRFKKIKPEAFEANRFYTVINKKSGEIVPMEVNFNFDDPNLIILPLAFGKRQGREFIWNDLLSLETGSLKLANGRVIEKTLYNRRTRQDEPALFVALTFERREVLDSSNIKPMNLIGVDRGENIPAVIALTDPEGCPLSRFKDSLGNPTHILRIGESYKEKQRTIQAKKEVEQRRAGGYSRKYASKAKNLADDMVRNTARDLLYYAVTQDAMLIFENLSRGFGRQGKRTFMAERQYTRMEDWLTAKLAYEGLPSKTYLSKTLAQYTSKTCSNCGFTITSADYDRVLEKLKKTATGWMTTINGKELKVEGQITYYNRYKRQNVVKDLSVELDRLSEESVNNDISSWTKGRSGEALSLLKKRFSHRPVQEKFVCLNCGFETHADEQAALNIARSWLFLRSQEYKKYQTNKTTGNTDKRAFVETWQSFYRKKLKEVWKPAV

SEQ ID NO: 51 - protein, 978 aa, synthetic construct
QEIKRINKIRRRLVKDSNTKKAGKTGPMKTLLVRVMTPDLRERLENLRKKPENIPQPISNTSRANLNKLLTDYTEMKKAILHVYWEEFQKDPVGLMSRVAQPASKKIDQNKLKPEMDEKGNLTTAGFACSQCGQPLFVYKLEQVSEKGKAYTNYFGRCNVAEHEKLILLAQLKPEKDSDEAVTYSLGKFGQRALDFYSIHVTKESTHPVKPLAQIAGNRYASVPVGKALSDACMGTIASFLSKYQDIIIEHQKVVKGNQKRLESLRELAGKENLEYPSVTLPPQPHTKEGVDAYNEVIARVRMWVNLNLWQKLKLSRDDAKPLLRLKGFPSFPLVERQANEVDWWDMVCNVKKLINEKKEDGKVFWQNLAGYKRQEALRPYLSSEEDRKKGKKFARYQLGDLLLHLEKKHGEDWGKVYDEAWERIDKKVEGLSKHIKLEEERRSEDAQSKAALTDWLRAKASFVIEGLKEADKDEFCRCELKLQKWYGDLRGKPFAIEAENSILDISGFSKQYNCAFIWQKDGVKKLNLYLIINYFKGGKLRFKKIKPEAFEANRFYTVINKKSGEIVPMEVNFNFDDPNLIILPLAFGKRQGREFIWNDLLSLETGSLKLANGRVIEKTLYNRRTRQDEPALFVALTFERREVLDSSNIKPMNLIGVDRGENIPAVIALTDPEGCPLSRFKDSLGNPTHILRIGESYKEKQRTIQAKKEVEQRRAGGYSRKYASKAKNLADDMVRNTARDLLYYAVTQDAMLIFENLSRGFGRQGKRTFMAERQYTRMEDWLTAKLAYEGLPSKTYLSKTLAQYTSKTCSNCGFTITSADYDRVLEKLKKTATGWMTTINGKELKVEGQITYYNRYKRQNVVKDLSVELDRLSEESVNNDISSWTKGRSGEALSLLKKRFSHRPVQEKFVCLNCGFETHADEQAALNIARSWLFLRSQEYKKYQTNKTTGNTDKRAFVETWQSFYRKKLKEVWKPAV

SEQ ID NO: 52 - protein, 978 aa, synthetic construct
QEIKRINKIRRRLVKDSNTKKAGKTGPMKTLLVRVMTPDLRERLENLRKKPENIPQPISNTSRANLNKLLTDYTEMKKAILHVYWEEFQKDPVGLMSRVAQPASKKIDQNKLKPEMDEKGNLTTAGFACSQCGQPLFVYKLEQVSEKGKAYTNYFGRCNVAEHEKLILLAQLKPEKDSDEAVTYSLGKFGQRALDFYSIHVTKESTHPVKPLAQIAGNRYASGPVGKALSLACMGTIASFLSKYQDIIIEHQKVVKGNQKRLESLRELAGKENLEYPSVTLPPQPHTKEGVDAYNEVIARVRMWVNLNLWQKLKLSRDDAKPLLRLKGFPSFPLVERQANEVDWWDMVCNVKKLINEKKEDGKVFWQNLAGYKRQEALRPYLSSEEDRKKGKKFARYQLGDLLLHLEKKHGEDWGKVYDEAWERIDKKVEGLSKHIKLEEERRSEDAQSKAALTDWLRAKASFVIEGLKEADKDEFCRCELKLQKWYGDLRGKPFAIEAENSILDISGFSKQYNCAFIWQKDGVKKLNLYLIINYFKGGKLRFKKIKPEAFEANRFYTVINKKSGEIVPMEVNFNFDDPNLIILPLAFGKRQGREFIWNDLLSLETGSLKLANGRVIEKTLYNRRTRQDEPALFVALTFERREVLDSSNIKPMNLIGVDRGENIPAVIALTDPEGCPLSRFKDSLGNPTHILRIGESYKEKQRTIQAKKEVEQRRAGGYSRKYASKAKNLADDMVRNTARDLLYYAVTQDAMLIFENLSRGFGRQGKRTFMAERQYTRMEDWLTAKLAYEGLPSKTYLSKTLAQYTSKTCSNCGFTITSADYDRVLEKLKKTATGWMTTINGKELKVEGQITYYNRYKRQNVVKDLSVELDRLSEESVNNDISSWTKGRSGEALSLLKKRFSHRPVQEKFVCLNCGFETHADEQAALNIARSWLFLRSQEYKKYQTNKTTGNTDKRAFVETWQSFYRKKLKEVWKPAV

SEQ ID NO: 53 - protein, 978 aa, synthetic construct
QEIKRINKIRRRLVKDSNTKKAGKTGPMKTLLVRVMTPDLRERLENLRKKPENIPQPISNTSRANLNKLLTDYTEMKKAILHVYWEEFQKDPVGLMSRVAQPASKKIDQNKLKPEMDEKGNLTTAGFACSQCGQPLFVYKLEQVSEKGKAYTNYFGRCNVAEHEKLILLAQLKPEKDSDEAVTYSLGKFGQRALDFYSIHVTKESTHPVKPLAQIAGNRYASGPVGKALSNACMGTIASFLSKYQDIIIEHQKVVKGNQKRLESLRELAGKENLEYPSVTLPPQPHTKEGVDAYNEVIARVRMWVNLNLWQKLKLSRDDAKPLLRLKGFPSFPLVERQANEVDWWDMVCNVKKLINEKKEDGKVFWQNLAGYKRQEALRPYLSSEEDRKKGKKFARYQLGDLLLHLEKKHGEDWGKVYDEAWERIDKKVEGLSKHIKLEEERRSEDAQSKAALTDWLRAKASFVIEGLKEADKDEFCRCELKLQKWYGDLRGKPFAIEAENSILDISGFSKQYNCAFIWQKDGVKKLNLYLIINYFKGGKLRFKKIKPEAFEANRFYTVINKKSGEIVPMEVNFNFDDPNLIILPLAFGKRQGREFIWNDLLSLETGSLKLANGRVIEKTLYNRRTRQDEPALFVALTFERREVLDSSNIKPMNLIGVDRGENIPAVIALTDPEGCPLSRFKDSLGNPTHILRIGESYKEKQRTIQAKKEVEQRRAGGYSRKYASKAKNLADDMVRNTARDLLYYAVTQDAMLIFENLSRGFGRQGKRTFMAERQYTRMEDWLTAKLAYEGLPSKTYLSKTLAQYTSKTCSNCGFTITSADYDRVLEKLKKTATGWMTTINGKELKVEGQITYYNRYKRQNVVKDLSVELDRLSEESVNNDISSWTKGRSGEALSLLKKRFSHRPVQEKFVCLNCGFETHADEQAALNIARSWLFLRSQEYKKYQTNKTTGNTDKRAFVETWQSFYRKKLKEVWKPAV

SEQ ID NO: 54 - protein, 978 aa, synthetic construct
QEIKRINKIRRRLVKDSNTKKAGKTGPMKTLLVRVMTPDLRERLENLRKKPENIPQPISNTSRANLNKLLTDYTEMKKAILHVYWEEFQKDPVGLMSRVAQPASKKIDQNKLKPEMDEKGNLTTAGFACSQCGQPLFVYKLEQVSEKGKAYTNYFGRCNVAEHEKLILLAQLKPEKDSDEAVTYSLGKFGQRALDFYSIHVTKESTHPVKPLAQIAGNRYASGPVGKALSQACMGTIASFLSKYQDIIIEHQKVVKGNQKRLESLRELAGKENLEYPSVTLPPQPHTKEGVDAYNEVIARVRMWVNLNLWQKLKLSRDDAKPLLRLKGFPSFPLVERQANEVDWWDMVCNVKKLINEKKEDGKVFWQNLAGYKRQEALRPYLSSEEDRKKGKKFARYQLGDLLLHLEKKHGEDWGKVYDEAWERIDKKVEGLSKHIKLEEERRSEDAQSKAALTDWLRAKASFVIEGLKEADKDEFCRCELKLQKWYGDLRGKPFAIEAENSILDISGFSKQYNCAFIWQKDGVKKLNLYLIINYFKGGKLRFKKIKPEAFEANRFYTVINKKSGEIVPMEVNFNFDDPNLIILPLAFGKRQGREFIWNDLLSLETGSLKLANGRVIEKTLYNRRTRQDEPALFVALTFERREVLDSSNIKPMNLIGVDRGENIPAVIALTDPEGCPLSRFKDSLGNPTHILRIGESYKEKQRTIQAKKEVEQRRAGGYSRKYASKAKNLADDMVRNTARDLLYYAVTQDAMLIFENLSRGFGRQGKRTFMAERQYTRMEDWLTAKLAYEGLPSKTYLSKTLAQYTSKTCSNCGFTITSADYDRVLEKLKKTATGWMTTINGKELKVEGQITYYNRYKRQNVVKDLSVELDRLSEESVNNDISSWTKGRSGEALSLLKKRFSHRPVQEKFVCLNCGFETHADEQAALNIARSWLFLRSQEYKKYQTNKTTGNTDKRAFVETWQSFYRKKLKEVWKPAV

SEQ ID NO: 55 - protein, 978 aa, synthetic construct
QEIKRINKIRRRLVKDSNTKKAGKTGPMKTLLVRVMTPDLRERLENLRKKPENIPQPISNTSRANLNKLLTDYTEMKKAILHVYWEEFQKDPVGLMSRVAQPASKKIDQNKLKPEMDEKGNLTTAGFACSQCGQPLFVYKLEQVSEKGKAYTNYFGRCNVAEHEKLILLAQLKPEKDSDEAVTYSLGKFGQRALDFYSIHVTKESTHPVKPLAQIAGNRYASGPVGKALSSACMGTIASFLSKYQDIIIEHQKVVKGNQKRLESLRELAGKENLEYPSVTLPPQPHTKEGVDAYNEVIARVRMWVNLNLWQKLKLSRDDAKPLLRLKGFPSFPLVERQANEVDWWDMVCNVKKLINEKKEDGKVFWQNLAGYKRQEALRPYLSSEEDRKKGKKFARYQLGDLLLHLEKKHGEDWGKVYDEAWERIDKKVEGLSKHIKLEEERRSEDAQSKAALTDWLRAKASFVIEGLKEADKDEFCRCELKLQKWYGDLRGKPFAIEAENSILDISGFSKQYNCAFIWQKDGVKKLNLYLIINYFKGGKLRFKKIKPEAFEANRFYTVINKKSGEIVPMEVNFNFDDPNLIILPLAFGKRQGREFIWNDLLSLETGSLKLANGRVIEKTLYNRRTRQDEPALFVALTFERREVLDSSNIKPMNLIGVDRGENIPAVIALTDPEGCPLSRFKDSLGNPTHILRIGESYKEKQRTIQAKKEVEQRRAGGYSRKYASKAKNLADDMVRNTARDLLYYAVTQDAMLIFENLSRGFGRQGKRTFMAERQYTRMEDWLTAKLAYEGLPSKTYLSKTLAQYTSKTCSNCGFTITSADYDRVLEKLKKTATGWMTTINGKELKVEGQITYYNRYKRQNVVKDLSVELDRLSEESVNNDISSWTKGRSGEALSLLKKRFSHRPVQEKFVCLNCGFETHADEQAALNIARSWLFLRSQEYKKYQTNKTTGNTDKRAFVETWQSFYRKKLKEVWKPAV

SEQ ID NO: 56 - protein, 978 aa, synthetic construct
QEIKRINKIRRRLVKDSNTKKAGKTGPMKTLLVRVMTPDLRERLENLRKKPENIPQPISNTSRANLNKLLTDYTEMKKAILHVYWEEFQKDPVGLMSRVAQPASKKIDQNKLKPEMDEKGNLTTAGFACSQCGQPLFVYKLEQVSEKGKAYTNYFGRCNVAEHEKLILLAQLKPEKDSDEAVTYSLGKFGQRALDFYSIHVTKESTHPVKPLAQIAGNRYASGPVGKALSAACMGTIASFLSKYQDIIIEHQKVVKGNQKRLESLRELAGKENLEYPSVTLPPQPHTKEGVDAYNEVIARVRMWVNLNLWQKLKLSRDDAKPLLRLKGFPSFPLVERQANEVDWWDMVCNVKKLINEKKEDGKVFWQNLAGYKRQEALRPYLSSEEDRKKGKKFARYQLGDLLLHLEKKHGEDWGKVYDEAWERIDKKVEGLSKHIKLEEERRSEDAQSKAALTDWLRAKASFVIEGLKEADKDEFCRCELKLQKWYGDLRGKPFAIEAENSILDISGFSKQYNCAFIWQKDGVKKLNLYLIINYFKGGKLRFKKIKPEAFEANRFYTVINKKSGEIVPMEVNFNFDDPNLIILPLAFGKRQGREFIWNDLLSLETGSLKLANGRVIEKTLYNRRTRQDEPALFVALTFERREVLDSSNIKPMNLIGVDRGENIPAVIALTDPEGCPLSRFKDSLGNPTHILRIGESYKEKQRTIQAKKEVEQRRAGGYSRKYASKAKNLADDMVRNTARDLLYYAVTQDAMLIFENLSRGFGRQGKRTFMAERQYTRMEDWLTAKLAYEGLPSKTYLSKTLAQYTSKTCSNCGFTITSADYDRVLEKLKKTATGWMTTINGKELKVEGQITYYNRYKRQNVVKDLSVELDRLSEESVNNDISSWTKGRSGEALSLLKKRFSHRPVQEKFVCLNCGFETHADEQAALNIARSWLFLRSQEYKKYQTNKTTGNTDKRAFVETWQSFYRKKLKEVWKPAV

SEQ ID NO: 57 - protein, 978 aa, synthetic construct
QEIKRINKIRRRLVKDSNTKKAGKTGPMKTLLVRVMTPDLRERLENLRKKPENIPQPISNTSRANLNKLLTDYTEMKKAILHVYWEEFQKDPVGLMSRVAQPASKKIDQNKLKPEMDEKGNLTTAGFACSQCGQPLFVYKLEQVSEKGKAYTNYFGRCNVAEHEKLILLAQLKPEKDSDEAVTYSLGKFGQRALDFYSIHVTKESTHPVKPLAQIAGNRYASGPVGKALSGACMGTIASFLSKYQDIIIEHQKVVKGNQKRLESLRELAGKENLEYPSVTLPPQPHTKEGVDAYNEVIARVRMWVNLNLWQKLKLSRDDAKPLLRLKGFPSFPLVERQANEVDWWDMVCNVKKLINEKKEDGKVFWQNLAGYKRQEALRPYLSSEEDRKKGKKFARYQLGDLLLHLEKKHGEDWGKVYDEAWERIDKKVEGLSKHIKLEEERRSEDAQSKAALTDWLRAKASFVIEGLKEADKDEFCRCELKLQKWYGDLRGKPFAIEAENSILDISGFSKQYNCAFIWQKDGVKKLNLYLIINYFKGGKLRFKKIKPEAFEANRFYTVINKKSGEIVPMEVNFNFDDPNLIILPLAFGKRQGREFIWNDLLSLETGSLKLANGRVIEKTLYNRRTRQDEPALFVALTFERREVLDSSNIKPMNLIGVDRGENIPAVIALTDPEGCPLSRFKDSLGNPTHILRIGESYKEKQRTIQAKKEVEQRRAGGYSRKYASKAKNLADDMVRNTARDLLYYAVTQDAMLIFENLSRGFGRQGKRTFMAERQYTRMEDWLTAKLAYEGLPSKTYLSKTLAQYTSKTCSNCGFTITSADYDRVLEKLKKTATGWMTTINGKELKVEGQITYYNRYKRQNVVKDLSVELDRLSEESVNNDISSWTKGRSGEALSLLKKRFSHRPVQEKFVCLNCGFETHADEQAALNIARSWLFLRSQEYKKYQTNKTTGNTDKRAFVETWQSFYRKKLKEVWKPAV

SEQ ID NO: 58 - protein, 978 aa, synthetic construct
QEIKRINKIRRRLVKDSNTKKAGKTGPMKTLLVRVMTPDLRERLENLRKKPENIPQPISNTSRANLNKLLTDYTEMKKAILHVYWEEFQKDPVGLMSRVAQPASKKIDQNKLKPEMDEKGNLTTAGFACSQCGQPLFVYKLEQVSEKGKAYTNYFGRCNVAEHEKLILLAQLKPEKDSDEAVTYSLGKFGQRALDFYSIHVTKESTHPVKPLAQIAGNRYASGPVGKALSTACMGTIASFLSKYQDIIIEHQKVVKGNQKRLESLRELAGKENLEYPSVTLPPQPHTKEGVDAYNEVIARVRMWVNLNLWQKLKLSRDDAKPLLRLKGFPSFPLVERQANEVDWWDMVCNVKKLINEKKEDGKVFWQNLAGYKRQEALRPYLSSEEDRKKGKKFARYQLGDLLLHLEKKHGEDWGKVYDEAWERIDKKVEGLSKHIKLEEERRSEDAQSKAALTDWLRAKASFVIEGLKEADKDEFCRCELKLQKWYGDLRGKPFAIEAENSILDISGFSKQYNCAFIWQKDGVKKLNLYLIINYFKGGKLRFKKIKPEAFEANRFYTVINKKSGEIVPMEVNFNFDDPNLIILPLAFGKRQGREFIWNDLLSLETGSLKLANGRVIEKTLYNRRTRQDEPALFVALTFERREVLDSSNIKPMNLIGVDRGENIPAVIALTDPEGCPLSRFKDSLGNPTHILRIGESYKEKQRTIQAKKEVEQRRAGGYSRKYASKAKNLADDMVRNTARDLLYYAVTQDAMLIFENLSRGFGRQGKRTFMAERQYTRMEDWLTAKLAYEGLPSKTYLSKTLAQYTSKTCSNCGFTITSADYDRVLEKLKKTATGWMTTINGKELKVEGQITYYNRYKRQNVVKDLSVELDRLSEESVNNDISSWTKGRSGEALSLLKKRFSHRPVQEKFVCLNCGFETHADEQAALNIARSWLFLRSQEYKKYQTNKTTGNTDKRAFVETWQSFYRKKLKEVWKPAV

SEQ ID NO: 59 - protein, 978 aa, synthetic construct
QEIKRINKIRRRLVKDSNTKKAGKRGPMKTLLVRVMTPDLRERLENLRKKPENIPQPISNTSRANLNKLLTDYTEMKKAILHVYWEEFQKDPVGLMSRVAQPASKKIDQNKLKPEMDEKGNLTTAGFACSQCGQPLFVYKLEQVSEKGKAYTNYFGRCNVAEHEKLILLAQLKPEKDSDEAVTYSLGKFGQRALDFYSIHVTKESTHPVKPLAQIAGNRYASGPVGKALSDACMGTIASFLSKYQDIIIEHQKVVKGNQKRLESLRELAGKENLEYPSVTLPPQPHTKEGVDAYNEVIARVRMWVNLNLWQKLKLSRDDAKPLLRLKGFPSFPLVERQANEVDWWDMVCNVKKLINEKKEDGKVFWQNLAGYKRQEALRPYLSSEEDRKKGKKFARYQLGDLLLHLEKKHGEDWGKVYDEAWERIDKKVEGLSKHIKLEEERRSEDAQSKAALTDWLRAKASFVIEGLKEADKDEFCRCELKLQKWYGDLRGKPFAIEAENSILDISGFSKQYNCAFIWQKDGVKKLNLYLIINYFKGGKLRFKKIKPEAFEANRFYTVINKKSGEIVPMEVNFNFDDPNLIILPLAFGKRQGREFIWNDLLSLETGSLKLANGRVIEKTLYNRRTRQDEPALFVALTFERREVLDSSNIKPMNLIGVDRGENIPAVIALTDPEGCPLSRFKDSLGNPTHILRIGESYKEKQRTIQAKKEVEQRRAGGYSRKYASKAKNLADDMVRNTARDLLYYAVTQDAMLIFENLSRGFGRQGKRTFMAERQYTRMEDWLTAKLAYEGLPSKTYLSKTLAQYTSKTCSNCGFTITSADYDRVLEKLKKTATGWMTTINGKELKVEGQITYYNRYKRQNVVKDLSVELDRLSEESVNNDISSWTKGRSGEALSLLKKRFSHRPVQEKFVCLNCGFETHADEQAALNIARSWLFLRSQEYKKYQTNKTTGNTDKRAFVETWQSFYRKKLKEVWKPAV

SEQ ID NO: 60 - protein, 978 aa, synthetic construct
QEIKRINKIRRRLVKDSNTKKAGKTGPMKTLLVRVMTPDLRERLENLRKKPENIPQPISNTSRANLNKLLTDYTEMKKAILHVYWEEFQKDPVGLMSRVAQPASKKIDQNKLKPEMDEKGNLTTAGFACSQCGQPLFVYKLEQVSEKGKAYTNYFGRCNVAEHEKLILLAQLKPEKDSDEAVTYSLGKFGQRALDFYSIHVTKESTHPVKPLAQIAGNRYASGPVGKALSDACMGTIASFLSKYQDIIIEHQKVVKGNQKRLESLRELAGKENLEYPSVTLPPQPHTKEGVDAYNEVIARVRMWVNLNLWQKLKLSRDDAKPLLRLKGFPSFPLVERQANEVDWWDMVCNVKKLINEKKEDGKVFWQNLAGYKRQEALRPYLSSEEDRKKGKKFARYQLHDLLLHLEKKHGEDWGKVYDEAWERIDKKVEGLSKHIKLEEERRSEDAQSKAALTDWLRAKASFVIEGLKEADKDEFCRCELKLQKWYGDLRGKPFAIEAENSILDISGFSKQYNCAFIWQKDGVKKLNLYLIINYFKGGKLRFKKIKPEAFEANRFYTVINKKSGEIVPMEVNFNFDDPNLIILPLAFGKRQGREFIWNDLLSLETGSLKLANGRVIEKTLYNRRTRQDEPALFVALTFERREVLDSSNIKPMNLIGVDRGENIPAVIALTDPEGCPLSRFKDSLGNPTHILRIGESYKEKQRTIQAKKEVEQRRAGGYSRKYASKAKNLADDMVRNTARDLLYYAVTQDAMLIFENLSRGFGRQGKRTFMAERQYTRMEDWLTAKLAYEGLPSKTYLSKTLAQYTSKTCSNCGFTITSADYDRVLEKLKKTATGWMTTINGKELKVEGQITYYNRYKRQNVVKDLSVELDRLSEESVNNDISSWTKGRSGEALSLLKKRFSHRPVQEKFVCLNCGFETHADEQAALNIARSWLFLRSQEYKKYQTNKTTGNTDKRAFVETWQSFYRKKLKEVWKPAV

SEQ ID NO: 61 - protein, 979 aa, synthetic construct
QEIKRINKIRRRLVKDSNTKKAGKTGPMKTLLVRVMTPDLRERLENLRKKPENIPQPISNTSRANLNKLLTDYTEMKKAILHVYWEEFQKDPVGLMSRVAQPASKKIDQNKLKPEMDEKEGNLTTAGFACSQCGQPLFVYKLEQVSEKGKAYTNYFGRCNVAEHEKLILLAQLKPEKDSDEAVTYSLGKFGQRALDFYSIHVTKESTHPVKPLAQIAGNRYASGPVGKALSDACMGTIASFLSKYQDIIIEHQKVVKGNQKRLESLRELAGKENLEYPSVTLPPQPHTKEGVDAYNEVIARVRMWVNLNLWQKLKLSRDDAKPLLRLKGFPSFPLVERQANEVDWWDMVCNVKKLINEKKEDGKVFWQNLAGYKRQEALRPYLSSEEDRKKGKKFARYQLGDLLLHLEKKHGEDWGKVYDEAWERIDKKVEGLSKHIKLEEERRSEDAQSKAALTDWLRAKASFVIEGLKEADKDEFCRCELKLQKWYGDLRGKPFAIEAENSILDISGFSKQYNCAFIWQKDGVKKLNLYLIINYFKGGKLRFKKIKPEAFEANRFYTVINKKSGEIVPMEVNFNFDDPNLIILPLAFGKRQGREFIWNDLLSLETGSLKLANGRVIEKTLYNRRTRQDEPALFVALTFERREVLDSSNIKPMNLIGVDRGENIPAVIALTDPEGCPLSRFKDSLGNPTHILRIGESYKEKQRTIQAKKEVEQRRAGGYSRKYASKAKNLADDMVRNTARDLLYYAVTQDAMLIFENLSRGFGRQGKRTFMAERQYTRMEDWLTAKLAYEGLPSKTYLSKTLAQYTSKTCSNCGFTITSADYDRVLEKLKKTATGWMTTINGKELKVEGQITYYNRYKRQNVVKDLSVELDRLSEESVNNDISSWTKGRSGEALSLLKKRFSHRPVQEKFVCLNCGFETHADEQAALNIARSWLFLRSQEYKKYQTNKTTGNTDKRAFVETWQSFYRKKLKEVWKPAV

SEQ ID NO: 62 - protein, 978 aa, synthetic construct
QEIKRINKIRRRLVKDSNTKKAGKTGPMKTLLVRVMTPDLRERLENLRKKPENIPQPISNTSRANLNKLLTDYTEMKKAILHVYWEEFQKDPVGLMSRVAQPASKKIDQNKLKPEMDEKGNLTTAGFACSQCGQPLFVYKLEQVSEKGKAYTNYFGRCNVAEHEKLILLAQLKPEKDSDEAVTYSLGKFGQRALDFYSIHVTKESTHPVKPLAQIAGNRYASGPVGKALSDACMGTIASFLSKYQDIIIEHQKVVKGNQKRLESLRELAGKENLEYPSVTLPPQPHTKEGVDAYNEVIARVRMWVNANLWQKLKLSRDDAKPLLRLKGFPSFPLVERQANEVDWWDMVCNVKKLINEKKEDGKVFWQNLAGYKRQEALRPYLSSEEDRKKGKKFARYQLGDLLLHLEKKHGEDWGKVYDEAWERIDKKVEGLSKHIKLEEERRSEDAQSKAALTDWLRAKASFVIEGLKEADKDEFCRCELKLQKWYGDLRGKPFAIEAENSILDISGFSKQYNCAFIWQKDGVKKLNLYLIINYFKGGKLRFKKIKPEAFEANRFYTVINKKSGEIVPMEVNFNFDDPNLIILPLAFGKRQGREFIWNDLLSLETGSLKLANGRVIEKTLYNRRTRQDEPALFVALTFERREVLDSSNIKPMNLIGVDRGENIPAVIALTDPEGCPLSRFKDSLGNPTHILRIGESYKEKQRTIQAKKEVEQRRAGGYSRKYASKAKNLADDMVRNTARDLLYYAVTQDAMLIFENLSRGFGRQGKRTFMAERQYTRMEDWLTAKLAYEGLPSKTYLSKTLAQYTSKTCSNCGFTITSADYDRVLEKLKKTATGWMTTINGKELKVEGQITYYNRYKRQNVVKDLSVELDRLSEESVNNDISSWTKGRSGEALSLLKKRFSHRPVQEKFVCLNCGFETHADEQAALNIARSWLFLRSQEYKKYQTNKTTGNTDKRAFVETWQSFYRKKLKEVWKPAV

SEQ ID NO: 63 - protein, 978 aa, synthetic construct
QEIKRINKIRRRLVKDSNTKKAGKTGPMKTLLVRVMTPDLRERLENLRKKPENIPQPISNTSRANLNKLLTDYTEMKKAILHVYWEEFQKDPVGLMSRVAQPASKKIDQNKLKPEMDEKGNLTTAGFACSQCGQPLFVYKLEQVSEKGKAYTNYFGRCNVAEHEKLILLAQLKPEKDSDEAVTYSLGKFGQRALDFYSIHVTKESTHPVKPLAQIAGNRYASGPVGKALSDACMGTIASFLSKYQDIIIEHQKVVKGNQKRLESLRELAGKENLEYPSVTLPPQPHTKEGVDAYNEVIARVRMWVNINLWQKLKLSRDDAKPLLRLKGFPSFPLVERQANEVDWWDMVCNVKKLINEKKEDGKVFWQNLAGYKRQEALRPYLSSEEDRKKGKKFARYQLGDLLLHLEKKHGEDWGKVYDEAWERIDKKVEGLSKHIKLEEERRSEDAQSKAALTDWLRAKASFVIEGLKEADKDEFCRCELKLQKWYGDLRGKPFAIEAENSILDISGFSKQYNCAFIWQKDGVKKLNLYLIINYFKGGKLRFKKIKPEAFEANRFYTVINKKSGEIVPMEVNFNFDDPNLIILPLAFGKRQGREFIWNDLLSLETGSLKLANGRVIEKTLYNRRTRQDEPALFVALTFERREVLDSSNIKPMNLIGVDRGENIPAVIALTDPEGCPLSRFKDSLGNPTHILRIGESYKEKQRTIQAKKEVEQRRAGGYSRKYASKAKNLADDMVRNTARDLLYYAVTQDAMLIFENLSRGFGRQGKRTFMAERQYTRMEDWLTAKLAYEGLPSKTYLSKTLAQYTSKTCSNCGFTITSADYDRVLEKLKKTATGWMTTINGKELKVEGQITYYNRYKRQNVVKDLSVELDRLSEESVNNDISSWTKGRSGEALSLLKKRFSHRPVQEKFVCLNCGFETHADEQAALNIARSWLFLRSQEYKKYQTNKTTGNTDKRAFVETWQSFYRKKLKEVWKPAV

SEQ ID NO: 64 - protein, 979 aa, synthetic construct
QEIKRINKIRRRLVKDSNTKKAGKTGPMKTLLVRVMTPDLRERLENLRKKPENIPQPISNTSRANLNKLLTDYTEMKKAILHVYWEEFQKDPVGLMSRVAQPASKKIDQNKLKPEMDEKGNLTTAGFACSQCGQPLFVYKLEQVSEKGKAYTNYFGRCNVAEHEKLILLAQLKPEKDSDEAVTYSLGKFGQRALDFYSIHVTKESTHPVKPLAQIAGNRYASGPVGKALSDACMGTIASFLSKYQDIIIEHQKVVKGNQKRLESLRELAGKENLEYPSVTLPPQPHTKEGVDAYNEVIARVRMWVNLNLWQKLKLSRDDAKPLLRLKGFPSFPLVERQANEVDWWDMVCNVKKLINEKKEDGKVFWQNLAGYKRQEALRPYLFSSEEDRKKGKKFARYQLGDLLLHLEKKHGEDWGKVYDEAWERIDKKVEGLSKHIKLEEERRSEDAQSKAALTDWLRAKASFVIEGLKEADKDEFCRCELKLQKWYGDLRGKPFAIEAENSILDISGFSKQYNCAFIWQKDGVKKLNLYLIINYFKGGKLRFKKIKPEAFEANRFYTVINKKSGEIVPMEVNFNFDDPNLIILPLAFGKRQGREFIWNDLLSLETGSLKLANGRVIEKTLYNRRTRQDEPALFVALTFERREVLDSSNIKPMNLIGVDRGENIPAVIALTDPEGCPLSRFKDSLGNPTHILRIGESYKEKQRTIQAKKEVEQRRAGGYSRKYASKAKNLADDMVRNTARDLLYYAVTQDAMLIFENLSRGFGRQGKRTFMAERQYTRMEDWLTAKLAYEGLPSKTYLSKTLAQYTSKTCSNCGFTITSADYDRVLEKLKKTATGWMTTINGKELKVEGQITYYNRYKRQNVVKDLSVELDRLSEESVNNDISSWTKGRSGEALSLLKKRFSHRPVQEKFVCLNCGFETHADEQAALNIARSWLFLRSQEYKKYQTNKTTGNTDKRAFVETWQSFYRKKLKEVWKPAV

SEQ ID NO: 65 - protein, 979 aa, synthetic construct
QEIKRINKIRRRLVKDSNTKKAGKTGPMKTLLVRVMTPDLRERLENLRKKPENIPQPISNTSRANLNKLLTDYTEMKKAILHVYWEEFQKDPVGLMSRVAQPASKKIDQNKLKPEMDEKGNLTTAGFACSQCGQPLFVYKWLEQVSEKGKAYTNYFGRCNVAEHEKLILLAQLKPEKDSDEAVTYSLGKFGQRALDFYSIHVTKESTHPVKPLAQIAGNRYASGPVGKALSDACMGTIASFLSKYQDIIIEHQKVVKGNQKRLESLRELAGKENLEYPSVTLPPQPHTKEGVDAYNEVIARVRMWVNLNLWQKLKLSRDDAKPLLRLKGFPSFPLVERQANEVDWWDMVCNVKKLINEKKEDGKVFWQNLAGYKRQEALRPYLSSEEDRKKGKKFARYQLGDLLLHLEKKHGEDWGKVYDEAWERIDKKVEGLSKHIKLEEERRSEDAQSKAALTDWLRAKASFVIEGLKEADKDEFCRCELKLQKWYGDLRGKPFAIEAENSILDISGFSKQYNCAFIWQKDGVKKLNLYLIINYFKGGKLRFKKIKPEAFEANRFYTVINKKSGEIVPMEVNFNFDDPNLIILPLAFGKRQGREFIWNDLLSLETGSLKLANGRVIEKTLYNRRTRQDEPALFVALTFERREVLDSSNIKPMNLIGVDRGENIPAVIALTDPEGCPLSRFKDSLGNPTHILRIGESYKEKQRTIQAKKEVEQRRAGGYSRKYASKAKNLADDMVRNTARDLLYYAVTQDAMLIFENLSRGFGRQGKRTFMAERQYTRMEDWLTAKLAYEGLPSKTYLSKTLAQYTSKTCSNCGFTITSADYDRVLEKLKKTATGWMTTINGKELKVEGQITYYNRYKRQNVVKDLSVELDRLSEESVNNDISSWTKGRSGEALSLLKKRFSHRPVQEKFVCLNCGFETHADEQAALNIARSWLFLRSQEYKKYQTNKTTGNTDKRAFVETWQSFYRKKLKEVWKPAV

SEQ ID NO: 66 - protein, 978 aa, synthetic construct
QEIKRINKIRRRLVKDSNTKKAGKTGPMKTLLVRVMTPDLRERLENLRKKPENIPQPISNTSRANLNKLLTDYTEMKKAILHVYWEEFQKDPVGLMSRVAQPASKKIDQNKLKPEMDEKGNLTTAGFACSQCGQPLFVYKLEQVSEKGKAYTNYFGRCNVAEHEKLILLAQLKPEKDSDEAVTYSLGKFGQRALDFYSIHVTKESTHPVKPLAQIAGNRYASGPVGKALSDACMGTIASFLSKYQDIIIEHQKVVKGNQKRLESLRELAGKENLEYPSVTLPPQPHTKEGVDAYNEVIARVRMWVNDNLWQKLKLSRDDAKPLLRLKGFPSFPLVERQANEVDWWDMVCNVKKLINEKKEDGKVFWQNLAGYKRQEALRPYLSSEEDRKKGKKFARYQLGDLLLHLEKKHGEDWGKVYDEAWERIDKKVEGLSKHIKLEEERRSEDAQSKAALTDWLRAKASFVIEGLKEADKDEFCRCELKLQKWYGDLRGKPFAIEAENSILDISGFSKQYNCAFIWQKDGVKKLNLYLIINYFKGGKLRFKKIKPEAFEANRFYTVINKKSGEIVPMEVNFNFDDPNLIILPLAFGKRQGREFIWNDLLSLETGSLKLANGRVIEKTLYNRRTRQDEPALFVALTFERREVLDSSNIKPMNLIGVDRGENIPAVIALTDPEGCPLSRFKDSLGNPTHILRIGESYKEKQRTIQAKKEVEQRRAGGYSRKYASKAKNLADDMVRNTARDLLYYAVTQDAMLIFENLSRGFGRQGKRTFMAERQYTRMEDWLTAKLAYEGLPSKTYLSKTLAQYTSKTCSNCGFTITSADYDRVLEKLKKTATGWMTTINGKELKVEGQITYYNRYKRQNVVKDLSVELDRLSEESVNNDISSWTKGRSGEALSLLKKRFSHRPVQEKFVCLNCGFETHADEQAALNIARSWLFLRSQEYKKYQTNKTTGNTDKRAFVETWQSFYRKKLKEVWKPAV

SEQ ID NO: 67 - protein, 978 aa, synthetic construct
QEIKRINKIRRRLVKDSNTKKAGKTGPMKTLLVRVMTPDLRERLENLRKKPENIPQPISNTSRANLNKLLTDYTEMKKAILHVYWEEFQKDPVGLMSRVAQPASKKIDQNKLKPEMDEKGNLTTAGFACSQCGQPLFVYKLEQVSEKGKAYTNYFGRCNVAEHEKLILLAQLKPEKDSDEAVTYSLGKFGQRALDFYSIHVTKESTHPVKPLAQIAGNRYASGPVGKALSDACMGTIASFLSKYQDIIIEHQKVVKGNQKRLESLRELAGKENLEYPSVTLPPQPHTKEGVDAYNEVIARVRMWVNLNLWQKLKLSRDDAKPLLRLKGFPSFPLVERQANEVDWWDMVCNVKKLINEKKEDGKVFWQNLAGYKRQEALRPYLSSEEDRKKGKKFARYQLGDLLLHLEKKHGEDWGKVYDEAWERIDKKVEGLSKHIKLEEERRSEDAQSKAALTDWLRAKASFVIEGLKEADKDEFCRCELKLQKWYGDLRGKPFAIEAENSILDISGFSTQYNCAFIWQKDGVKKLNLYLIINYFKGGKLRFKKIKPEAFEANRFYTVINKKSGEIVPMEVNFNFDDPNLIILPLAFGKRQGREFIWNDLLSLETGSLKLANGRVIEKTLYNRRTRQDEPALFVALTFERREVLDSSNIKPMNLIGVDRGENIPAVIALTDPEGCPLSRFKDSLGNPTHILRIGESYKEKQRTIQAKKEVEQRRAGGYSRKYASKAKNLADDMVRNTARDLLYYAVTQDAMLIFENLSRGFGRQGKRTFMAERQYTRMEDWLTAKLAYEGLPSKTYLSKTLAQYTSKTCSNCGFTITSADYDRVLEKLKKTATGWMTTINGKELKVEGQITYYNRYKRQNVVKDLSVELDRLSEESVNNDISSWTKGRSGEALSLLKKRFSHRPVQEKFVCLNCGFETHADEQAALNIARSWLFLRSQEYKKYQTNKTTGNTDKRAFVETWQSFYRKKLKEVWKPAV

SEQ ID NO: 68 - protein, 978 aa, synthetic construct
QEIKRINKIRRRLVKDSNTKKAGKTGPMKTLLVRVMTPDLRERLENLRKKPENIPQPISNTSRANLNKLLTDYTEMKKAILHVYWEEFQKDPVGLMSRVAQPASKKIDQNKLKPEMDEKGNLTTAGFACSQCGQPLFVYKLEQVSEKGKAYTNYFGRCNVAEHEKLILLDQLKPEKDSDEAVTYSLGKFGQRALDFYSIHVTKESTHPVKPLAQIAGNRYASGPVGKALSDACMGTIASFLSKYQDIIIEHQKVVKGNQKRLESLRELAGKENLEYPSVTLPPQPHTKEGVDAYNEVIARVRMWVNLNLWQKLKLSRDDAKPLLRLKGFPSFPLVERQANEVDWWDMVCNVKKLINEKKEDGKVFWQNLAGYKRQEALRPYLSSEEDRKKGKKFARYQLGDLLLHLEKKHGEDWGKVYDEAWERIDKKVEGLSKHIKLEEERRSEDAQSKAALTDWLRAKASFVIEGLKEADKDEFCRCELKLQKWYGDLRGKPFAIEAENSILDISGFSKQYNCAFIWQKDGVKKLNLYLIINYFKGGKLRFKKIKPEAFEANRFYTVINKKSGEIVPMEVNFNFDDPNLIILPLAFGKRQGREFIWNDLLSLETGSLKLANGRVIEKTLYNRRTRQDEPALFVALTFERREVLDSSNIKPMNLIGVDRGENIPAVIALTDPEGCPLSRFKDSLGNPTHILRIGESYKEKQRTIQAKKEVEQRRAGGYSRKYASKAKNLADDMVRNTARDLLYYAVTQDAMLIFENLSRGFGRQGKRTFMAERQYTRMEDWLTAKLAYEGLPSKTYLSKTLAQYTSKTCSNCGFTITSADYDRVLEKLKKTATGWMTTINGKELKVEGQITYYNRYKRQNVVKDLSVELDRLSEESVNNDISSWTKGRSGEALSLLKKRFSHRPVQEKFVCLNCGFETHADEQAALNIARSWLFLRSQEYKKYQTNKTTGNTDKRAFVETWQSFYRKKLKEVWKPAV

SEQ ID NO: 69 - protein, 978 aa, synthetic construct
QEIKRINKIRRRLVKDSNTKKAGKTGPMKTLLVRVMTPDLRERLENLRKKPENIPQPISNTSRANLNKLLTDYTEMKKAILHVYWEEFQKDPVGLMSRVAQPASKKIDQNKLKPEMDEKGNLTTAGFACSQCGQPLFVYKLEQVSEKGKAYTNYFGRCNVAEHEKLIPLAQLKPEKDSDEAVTYSLGKFGQRALDFYSIHVTKESTHPVKPLAQIAGNRYASGPVGKALSDACMGTIASFLSKYQDIIIEHQKVVKGNQKRLESLRELAGKENLEYPSVTLPPQPHTKEGVDAYNEVIARVRMWVNLNLWQKLKLSRDDAKPLLRLKGFPSFPLVERQANEVDWWDMVCNVKKLINEKKEDGKVFWQNLAGYKRQEALRPYLSSEEDRKKGKKFARYQLGDLLLHLEKKHGEDWGKVYDEAWERIDKKVEGLSKHIKLEEERRSEDAQSKAALTDWLRAKASFVIEGLKEADKDEFCRCELKLQKWYGDLRGKPFAIEAENSILDISGFSKQYNCAFIWQKDGVKKLNLYLIINYFKGGKLRFKKIKPEAFEANRFYTVINKKSGEIVPMEVNFNFDDPNLIILPLAFGKRQGREFIWNDLLSLETGSLKLANGRVIEKTLYNRRTRQDEPALFVALTFERREVLDSSNIKPMNLIGVDRGENIPAVIALTDPEGCPLSRFKDSLGNPTHILRIGESYKEKQRTIQAKKEVEQRRAGGYSRKYASKAKNLADDMVRNTARDLLYYAVTQDAMLIFENLSRGFGRQGKRTFMAERQYTRMEDWLTAKLAYEGLPSKTYLSKTLAQYTSKTCSNCGFTITSADYDRVLEKLKKTATGWMTTINGKELKVEGQITYYNRYKRQNVVKDLSVELDRLSEESVNNDISSWTKGRSGEALSLLKKRFSHRPVQEKFVCLNCGFETHADEQAALNIARSWLFLRSQEYKKYQTNKTTGNTDKRAFVETWQSFYRKKLKEVWKPAV

SEQ ID NO: 70 - protein, 978 aa, synthetic construct
QEIKRINKIRRRLVKDSNTKKAGKTGPMKTLLVRVMTPDLRERLENLRKKPENIPQPISNTSRANLNKLLTDYTEMKKAILHVYWEEFQKDPVGLMSRVAQPASKKIDQNKLKPEMDEKGNLTTAGFACSQCGQPLFVYKLEQVSEKGKAYTNYFGRCNVAEHEKLILLAQLKPEKDSDEAVTYSLGKFGQRALDFYSIHVTKESTHPVKPLAQIAGNRYASGPVGKALSDACMGTIASFLSKYQDIIIEHQKVVKGNQKRLESLRELAGKENLEYPSVTLPPQPHTKEGVDAYNEVIARVRMWVNLNLWQKLKLSRDDAKPLLRLKGFPSFPLVERQANEVDWWDMVCNVKKLINEKKEDGKVFWQNLAGYKRQEALRPYLSSEEDRKKGKKFARYQLGDLLLHLEKKHGEDWGKVYDEAWERIDKKVEGLSKHIKLEEERRSEDAQSKAALTDWLRAKASFVIEGLKEADKDEFCRCELKLQKWYGDLRGKPFAIEAENSILDISGFSKQYNCAFIWQKDGVKKLNLYLIINYFKGGKLRFKKIKPEAFEANRFYTVINKKSGEIVPMEVNFNFDDPNLIILPLAFGKRQGREFIWNDLLSLETGSLKLANGRVIEKTLYNRRTRQDEPALFVALTFERREVLDSSNIKPMNLIGVDRGENIPAVIALTDPEGCPLSRFKDSLGNPTHILRIGESYKEKQRTIQAKKEVEQRRAGGYSRKYASKAKNLADDMVRNTARDLLYYAVTQDAMLIFENLSRGFGRQGKRTFMAERQYTRMEDWLTAKKAYEGLPSKTYLSKTLAQYTSKTCSNCGFTITSADYDRVLEKLKKTATGWMTTINGKELKVEGQITYYNRYKRQNVVKDLSVELDRLSEESVNNDISSWTKGRSGEALSLLKKRFSHRPVQEKFVCLNCGFETHADEQAALNIARSWLFLRSQEYKKYQTNKTTGNTDKRAFVETWQSFYRKKLKEVWKPAV

SEQ ID NO: 71 - protein, 978 aa, synthetic construct
QEIKRINKIRRRLVKDSNTKKAGKTGPMKTLLVRVMTPDLRERLENLRKKPENIPQPISNTSRANLNKLLTDYTEMKKAILHVYWEEFQKDPVGLMSRVAQPASKKIDQNKLKPEMDEKGNLTTAGFACSQCGQPLFVYKLEQVSEKGKAYTNYFGRCNVAEHEKLILLAQLKPEKDSDEAVTYSLGKFGQRALDFYSIHVTKESTHPVKPLAQIAGNRYASGPVGKALSDACMGTIASFLSKYQDIIIEHQKVVKGNQKRLESLRELAGKENLEYPSVTLPPQPHTKEGVDAYNEVIARVRMWVNLNLWQKLKLSRDDAKPLLRLKGFPSFPLVERQANEVDWWDMVCNVKKLINEKKEDGKVFWQNLAGYKRQEALRPYLSSEEDRKKGKKFARYQLGDLLLHLEKKHGEDWGKVYDEAWERIDKKVEGLSKHIKLEEERRSEDAQSKAALTDWLRAKASFVIEGLKEADKDEFCRCELKLQKWYGDLRGKPFAIEAENSILDISGFSKQYNCAFIWQKDGVKKLNLYLIINYFKGGKLRFKKIKPEAFEANRFYTVINKKSGEIVPMEVNFNFDDPNLIILPLAFGKRQGREFIWNDLLSLETGSLKLANGRVIEKTLYNRRTRQDEPALFVALTFERREVLDSSNIKPMNLIGVDRGENIPAVIALTDPEGCPLSRFKDSLGNPTHILRIGESYKEKQRTIQAKKEVEQRRAGGYSRKYASKAKNLADDMVRNTARDLLYYAVTQDAMLIFENLSRGFGRQGKRTFMAERQYTRMEDWLTAKLKYEGLPSKTYLSKTLAQYTSKTCSNCGFTITSADYDRVLEKLKKTATGWMTTINGKELKVEGQITYYNRYKRQNVVKDLSVELDRLSEESVNNDISSWTKGRSGEALSLLKKRFSHRPVQEKFVCLNCGFETHADEQAALNIARSWLFLRSQEYKKYQTNKTTGNTDKRAFVETWQSFYRKKLKEVWKPAV

SEQ ID NO: 72 - protein, 978 aa, synthetic construct
QEGKRINKIRRRLVKDSNTKKAGKTGPMKTLLVRVMTPDLRERLENLRKKPENIPQPISNTSRANLNKLLTDYTEMKKAILHVYWEEFQKDPVGLMSRVAQPASKKIDQNKLKPEMDEKGNLTTAGFACSQCGQPLFVYKLEQVSEKGKAYTNYFGRCNVAEHEKLILLAQLKPEKDSDEAVTYSLGKFGQRALDFYSIHVTKESTHPVKPLAQIAGNRYASGPVGKALSDACMGTIASFLSKYQDIIIEHQKVVKGNQKRLESLRELAGKENLEYPSVTLPPQPHTKEGVDAYNEVIARVRMWVNLNLWQKLKLSRDDAKPLLRLKGFPSFPLVERQANEVDWWDMVCNVKKLINEKKEDGKVFWQNLAGYKRQEALRPYLSSEEDRKKGKKFARYQLGDLLLHLEKKHGEDWGKVYDEAWERIDKKVEGLSKHIKLEEERRSEDAQSKAALTDWLRAKASFVIEGLKEADKDEFCRCELKLQKWYGDLRGKPFAIEAENSILDISGFSKQYNCAFIWQKDGVKKLNLYLIINYFKGGKLRFKKIKPEAFEANRFYTVINKKSGEIVPMEVNFNFDDPNLIILPLAFGKRQGREFIWNDLLSLETGSLKLANGRVIEKTLYNRRTRQDEPALFVALTFERREVLDSSNIKPMNLIGVDRGENIPAVIALTDPEGCPLSRFKDSLGNPTHILRIGESYKEKQRTIQAKKEVEQRRAGGYSRKYASKAKNLADDMVRNTARDLLYYAVTQDAMLIFENLSRGFGRQGKRTFMAERQYTRMEDWLTAKLAYEGLPSKTYLSKTLAQYTSKTCSNCGFTITSADYDRVLEKLKKTATGWMTTINGKELKVEGQITYYNRYKRQNVVKDLSVELDRLSEESVNNDISSWTKGRSGEALSLLKKRFSHRPVQEKFVCLNCGFETHADEQAALNIARSWLFLRSQEYKKYQTNKTTGNTDKRAFVETWQSFYRKKLKEVWKPAV

SEQ ID NO: 73 - protein, 978 aa, synthetic construct
QEEKRINKIRRRLVKDSNTKKAGKTGPMKTLLVRVMTPDLRERLENLRKKPENIPQPISNTSRANLNKLLTDYTEMKKAILHVYWEEFQKDPVGLMSRVAQPASKKIDQNKLKPEMDEKGNLTTAGFACSQCGQPLFVYKLEQVSEKGKAYTNYFGRCNVAEHEKLILLAQLKPEKDSDEAVTYSLGKFGQRALDFYSIHVTKESTHPVKPLAQIAGNRYASGPVGKALSDACMGTIASFLSKYQDIIIEHQKVVKGNQKRLESLRELAGKENLEYPSVTLPPQPHTKEGVDAYNEVIARVRMWVNLNLWQKLKLSRDDAKPLLRLKGFPSFPLVERQANEVDWWDMVCNVKKLINEKKEDGKVFWQNLAGYKRQEALRPYLSSEEDRKKGKKFARYQLGDLLLHLEKKHGEDWGKVYDEAWERIDKKVEGLSKHIKLEEERRSEDAQSKAALTDWLRAKASFVIEGLKEADKDEFCRCELKLQKWYGDLRGKPFAIEAENSILDISGFSKQYNCAFIWQKDGVKKLNLYLIINYFKGGKLRFKKIKPEAFEANRFYTVINKKSGEIVPMEVNFNFDDPNLIILPLAFGKRQGREFIWNDLLSLETGSLKLANGRVIEKTLYNRRTRQDEPALFVALTFERREVLDSSNIKPMNLIGVDRGENIPAVIALTDPEGCPLSRFKDSLGNPTHILRIGESYKEKQRTIQAKKEVEQRRAGGYSRKYASKAKNLADDMVRNTARDLLYYAVTQDAMLIFENLSRGFGRQGKRTFMAERQYTRMEDWLTAKLAYEGLPSKTYLSKTLAQYTSKTCSNCGFTITSADYDRVLEKLKKTATGWMTTINGKELKVEGQITYYNRYKRQNVVKDLSVELDRLSEESVNNDISSWTKGRSGEALSLLKKRFSHRPVQEKFVCLNCGFETHADEQAALNIARSWLFLRSQEYKKYQTNKTTGNTDKRAFVETWQSFYRKKLKEVWKPAV

SEQ ID NO: 74 - protein, 979 aa, synthetic construct
QEIGKRINKIRRRLVKDSNTKKAGKTGPMKTLLVRVMTPDLRERLENLRKKPENIPQPISNTSRANLNKLLTDYTEMKKAILHVYWEEFQKDPVGLMSRVAQPASKKIDQNKLKPEMDEKGNLTTAGFACSQCGQPLFVYKLEQVSEKGKAYTNYFGRCNVAEHEKLILLAQLKPEKDSDEAVTYSLGKFGQRALDFYSIHVTKESTHPVKPLAQIAGNRYASGPVGKALSDACMGTIASFLSKYQDIIIEHQKVVKGNQKRLESLRELAGKENLEYPSVTLPPQPHTKEGVDAYNEVIARVRMWVNLNLWQKLKLSRDDAKPLLRLKGFPSFPLVERQANEVDWWDMVCNVKKLINEKKEDGKVFWQNLAGYKRQEALRPYLSSEEDRKKGKKFARYQLGDLLLHLEKKHGEDWGKVYDEAWERIDKKVEGLSKHIKLEEERRSEDAQSKAALTDWLRAKASFVIEGLKEADKDEFCRCELKLQKWYGDLRGKPFAIEAENSILDISGFSKQYNCAFIWQKDGVKKLNLYLIINYFKGGKLRFKKIKPEAFEANRFYTVINKKSGEIVPMEVNFNFDDPNLIILPLAFGKRQGREFIWNDLLSLETGSLKLANGRVIEKTLYNRRTRQDEPALFVALTFERREVLDSSNIKPMNLIGVDRGENIPAVIALTDPEGCPLSRFKDSLGNPTHILRIGESYKEKQRTIQAKKEVEQRRAGGYSRKYASKAKNLADDMVRNTARDLLYYAVTQDAMLIFENLSRGFGRQGKRTFMAERQYTRMEDWLTAKLAYEGLPSKTYLSKTLAQYTSKTCSNCGFTITSADYDRVLEKLKKTATGWMTTINGKELKVEGQITYYNRYKRQNVVKDLSVELDRLSEESVNNDISSWTKGRSGEALSLLKKRFSHRPVQEKFVCLNCGFETHADEQAALNIARSWLFLRSQEYKKYQTNKTTGNTDKRAFVETWQSFYRKKLKEVWKPAV

SEQ ID NO: 75 - protein, 978 aa, synthetic construct
QEIGRINKIRRRLVKDSNTKKAGKTGPMKTLLVRVMTPDLRERLENLRKKPENIPQPISNTSRANLNKLLTDYTEMKKAILHVYWEEFQKDPVGLMSRVAQPASKKIDQNKLKPEMDEKGNLTTAGFACSQCGQPLFVYKLEQVSEKGKAYTNYFGRCNVAEHEKLILLAQLKPEKDSDEAVTYSLGKFGQRALDFYSIHVTKESTHPVKPLAQIAGNRYASGPVGKALSDACMGTIASFLSKYQDIIIEHQKVVKGNQKRLESLRELAGKENLEYPSVTLPPQPHTKEGVDAYNEVIARVRMWVNLNLWQKLKLSRDDAKPLLRLKGFPSFPLVERQANEVDWWDMVCNVKKLINEKKEDGKVFWQNLAGYKRQEALRPYLSSEEDRKKGKKFARYQLGDLLLHLEKKHGEDWGKVYDEAWERIDKKVEGLSKHIKLEEERRSEDAQSKAALTDWLRAKASFVIEGLKEADKDEFCRCELKLQKWYGDLRGKPFAIEAENSILDISGFSKQYNCAFIWQKDGVKKLNLYLIINYFKGGKLRFKKIKPEAFEANRFYTVINKKSGEIVPMEVNFNFDDPNLIILPLAFGKRQGREFIWNDLLSLETGSLKLANGRVIEKTLYNRRTRQDEPALFVALTFERREVLDSSNIKPMNLIGVDRGENIPAVIALTDPEGCPLSRFKDSLGNPTHILRIGESYKEKQRTIQAKKEVEQRRAGGYSRKYASKAKNLADDMVRNTARDLLYYAVTQDAMLIFENLSRGFGRQGKRTFMAERQYTRMEDWLTAKLAYEGLPSKTYLSKTLAQYTSKTCSNCGFTITSADYDRVLEKLKKTATGWMTTINGKELKVEGQITYYNRYKRQNVVKDLSVELDRLSEESVNNDISSWTKGRSGEALSLLKKRFSHRPVQEKFVCLNCGFETHADEQAALNIARSWLFLRSQEYKKYQTNKTTGNTDKRAFVETWQSFYRKKLKEVWKPAV

SEQ ID NO: 76 - protein, 978 aa, synthetic construct
QEISRINKIRRRLVKDSNTKKAGKTGPMKTLLVRVMTPDLRERLENLRKKPENIPQPISNTSRANLNKLLTDYTEMKKAILHVYWEEFQKDPVGLMSRVAQPASKKIDQNKLKPEMDEKGNLTTAGFACSQCGQPLFVYKLEQVSEKGKAYTNYFGRCNVAEHEKLILLAQLKPEKDSDEAVTYSLGKFGQRALDFYSIHVTKESTHPVKPLAQIAGNRYASGPVGKALSDACMGTIASFLSKYQDIIIEHQKVVKGNQKRLESLRELAGKENLEYPSVTLPPQPHTKEGVDAYNEVIARVRMWVNLNLWQKLKLSRDDAKPLLRLKGFPSFPLVERQANEVDWWDMVCNVKKLINEKKEDGKVFWQNLAGYKRQEALRPYLSSEEDRKKGKKFARYQLGDLLLHLEKKHGEDWGKVYDEAWERIDKKVEGLSKHIKLEEERRSEDAQSKAALTDWLRAKASFVIEGLKEADKDEFCRCELKLQKWYGDLRGKPFAIEAENSILDISGFSKQYNCAFIWQKDGVKKLNLYLIINYFKGGKLRFKKIKPEAFEANRFYTVINKKSGEIVPMEVNFNFDDPNLIILPLAFGKRQGREFIWNDLLSLETGSLKLANGRVIEKTLYNRRTRQDEPALFVALTFERREVLDSSNIKPMNLIGVDRGENIPAVIALTDPEGCPLSRFKDSLGNPTHILRIGESYKEKQRTIQAKKEVEQRRAGGYSRKYASKAKNLADDMVRNTARDLLYYAVTQDAMLIFENLSRGFGRQGKRTFMAERQYTRMEDWLTAKLAYEGLPSKTYLSKTLAQYTSKTCSNCGFTITSADYDRVLEKLKKTATGWMTTINGKELKVEGQITYYNRYKRQNVVKDLSVELDRLSEESVNNDISSWTKGRSGEALSLLKKRFSHRPVQEKFVCLNCGFETHADEQAALNIARSWLFLRSQEYKKYQTNKTTGNTDKRAFVETWQSFYRKKLKEVWKPAV

SEQ ID NO: 77 - protein, 979 aa, synthetic construct
QEIKGRINKIRRRLVKDSNTKKAGKTGPMKTLLVRVMTPDLRERLENLRKKPENIPQPISNTSRANLNKLLTDYTEMKKAILHVYWEEFQKDPVGLMSRVAQPASKKIDQNKLKPEMDEKGNLTTAGFACSQCGQPLFVYKLEQVSEKGKAYTNYFGRCNVAEHEKLILLAQLKPEKDSDEAVTYSLGKFGQRALDFYSIHVTKESTHPVKPLAQIAGNRYASGPVGKALSDACMGTIASFLSKYQDIIIEHQKVVKGNQKRLESLRELAGKENLEYPSVTLPPQPHTKEGVDAYNEVIARVRMWVNLNLWQKLKLSRDDAKPLLRLKGFPSFPLVERQANEVDWWDMVCNVKKLINEKKEDGKVFWQNLAGYKRQEALRPYLSSEEDRKKGKKFARYQLGDLLLHLEKKHGEDWGKVYDEAWERIDKKVEGLSKHIKLEEERRSEDAQSKAALTDWLRAKASFVIEGLKEADKDEFCRCELKLQKWYGDLRGKPFAIEAENSILDISGFSKQYNCAFIWQKDGVKKLNLYLIINYFKGGKLRFKKIKPEAFEANRFYTVINKKSGEIVPMEVNFNFDDPNLIILPLAFGKRQGREFIWNDLLSLETGSLKLANGRVIEKTLYNRRTRQDEPALFVALTFERREVLDSSNIKPMNLIGVDRGENIPAVIALTDPEGCPLSRFKDSLGNPTHILRIGESYKEKQRTIQAKKEVEQRRAGGYSRKYASKAKNLADDMVRNTARDLLYYAVTQDAMLIFENLSRGFGRQGKRTFMAERQYTRMEDWLTAKLAYEGLPSKTYLSKTLAQYTSKTCSNCGFTITSADYDRVLEKLKKTATGWMTTINGKELKVEGQITYYNRYKRQNVVKDLSVELDRLSEESVNNDISSWTKGRSGEALSLLKKRFSHRPVQEKFVCLNCGFETHADEQAALNIARSWLFLRSQEYKKYQTNKTTGNTDKRAFVETWQSFYRKKLKEVWKPAV

SEQ ID NO: 78 - protein, 978 aa, synthetic construct
QEIKSINKIRRRLVKDSNTKKAGKTGPMKTLLVRVMTPDLRERLENLRKKPENIPQPISNTSRANLNKLLTDYTEMKKAILHVYWEEFQKDPVGLMSRVAQPASKKIDQNKLKPEMDEKGNLTTAGFACSQCGQPLFVYKLEQVSEKGKAYTNYFGRCNVAEHEKLILLAQLKPEKDSDEAVTYSLGKFGQRALDFYSIHVTKESTHPVKPLAQIAGNRYASGPVGKALSDACMGTIASFLSKYQDIIIEHQKVVKGNQKRLESLRELAGKENLEYPSVTLPPQPHTKEGVDAYNEVIARVRMWVNLNLWQKLKLSRDDAKPLLRLKGFPSFPLVERQANEVDWWDMVCNVKKLINEKKEDGKVFWQNLAGYKRQEALRPYLSSEEDRKKGKKFARYQLGDLLLHLEKKHGEDWGKVYDEAWERIDKKVEGLSKHIKLEEERRSEDAQSKAALTDWLRAKASFVIEGLKEADKDEFCRCELKLQKWYGDLRGKPFAIEAENSILDISGFSKQYNCAFIWQKDGVKKLNLYLIINYFKGGKLRFKKIKPEAFEANRFYTVINKKSGEIVPMEVNFNFDDPNLIILPLAFGKRQGREFIWNDLLSLETGSLKLANGRVIEKTLYNRRTRQDEPALFVALTFERREVLDSSNIKPMNLIGVDRGENIPAVIALTDPEGCPLSRFKDSLGNPTHILRIGESYKEKQRTIQAKKEVEQRRAGGYSRKYASKAKNLADDMVRNTARDLLYYAVTQDAMLIFENLSRGFGRQGKRTFMAERQYTRMEDWLTAKLAYEGLPSKTYLSKTLAQYTSKTCSNCGFTITSADYDRVLEKLKKTATGWMTTINGKELKVEGQITYYNRYKRQNVVKDLSVELDRLSEESVNNDISSWTKGRSGEALSLLKKRFSHRPVQEKFVCLNCGFETHADEQAALNIARSWLFLRSQEYKKYQTNKTTGNTDKRAFVETWQSFYRKKLKEVWKPAV

SEQ ID NO: 79 - protein, 978 aa, synthetic construct
QEIKRANKIRRRLVKDSNTKKAGKTGPMKTLLVRVMTPDLRERLENLRKKPENIPQPISNTSRANLNKLLTDYTEMKKAILHVYWEEFQKDPVGLMSRVAQPASKKIDQNKLKPEMDEKGNLTTAGFACSQCGQPLFVYKLEQVSEKGKAYTNYFGRCNVAEHEKLILLAQLKPEKDSDEAVTYSLGKFGQRALDFYSIHVTKESTHPVKPLAQIAGNRYASGPVGKALSDACMGTIASFLSKYQDIIIEHQKVVKGNQKRLESLRELAGKENLEYPSVTLPPQPHTKEGVDAYNEVIARVRMWVNLNLWQKLKLSRDDAKPLLRLKGFPSFPLVERQANEVDWWDMVCNVKKLINEKKEDGKVFWQNLAGYKRQEALRPYLSSEEDRKKGKKFARYQLGDLLLHLEKKHGEDWGKVYDEAWERIDKKVEGLSKHIKLEEERRSEDAQSKAALTDWLRAKASFVIEGLKEADKDEFCRCELKLQKWYGDLRGKPFAIEAENSILDISGFSKQYNCAFIWQKDGVKKLNLYLIINYFKGGKLRFKKIKPEAFEANRFYTVINKKSGEIVPMEVNFNFDDPNLIILPLAFGKRQGREFIWNDLLSLETGSLKLANGRVIEKTLYNRRTRQDEPALFVALTFERREVLDSSNIKPMNLIGVDRGENIPAVIALTDPEGCPLSRFKDSLGNPTHILRIGESYKEKQRTIQAKKEVEQRRAGGYSRKYASKAKNLADDMVRNTARDLLYYAVTQDAMLIFENLSRGFGRQGKRTFMAERQYTRMEDWLTAKLAYEGLPSKTYLSKTLAQYTSKTCSNCGFTITSADYDRVLEKLKKTATGWMTTINGKELKVEGQITYYNRYKRQNVVKDLSVELDRLSEESVNNDISSWTKGRSGEALSLLKKRFSHRPVQEKFVCLNCGFETHADEQAALNIARSWLFLRSQEYKKYQTNKTTGNTDKRAFVETWQSFYRKKLKEVWKPAV

SEQ ID NO: 80 - protein, 979 aa, synthetic construct
QEIKRGINKIRRRLVKDSNTKKAGKTGPMKTLLVRVMTPDLRERLENLRKKPENIPQPISNTSRANLNKLLTDYTEMKKAILHVYWEEFQKDPVGLMSRVAQPASKKIDQNKLKPEMDEKGNLTTAGFACSQCGQPLFVYKLEQVSEKGKAYTNYFGRCNVAEHEKLILLAQLKPEKDSDEAVTYSLGKFGQRALDFYSIHVTKESTHPVKPLAQIAGNRYASGPVGKALSDACMGTIASFLSKYQDIIIEHQKVVKGNQKRLESLRELAGKENLEYPSVTLPPQPHTKEGVDAYNEVIARVRMWVNLNLWQKLKLSRDDAKPLLRLKGFPSFPLVERQANEVDWWDMVCNVKKLINEKKEDGKVFWQNLAGYKRQEALRPYLSSEEDRKKGKKFARYQLGDLLLHLEKKHGEDWGKVYDEAWERIDKKVEGLSKHIKLEEERRSEDAQSKAALTDWLRAKASFVIEGLKEADKDEFCRCELKLQKWYGDLRGKPFAIEAENSILDISGFSKQYNCAFIWQKDGVKKLNLYLIINYFKGGKLRFKKIKPEAFEANRFYTVINKKSGEIVPMEVNFNFDDPNLIILPLAFGKRQGREFIWNDLLSLETGSLKLANGRVIEKTLYNRRTRQDEPALFVALTFERREVLDSSNIKPMNLIGVDRGENIPAVIALTDPEGCPLSRFKDSLGNPTHILRIGESYKEKQRTIQAKKEVEQRRAGGYSRKYASKAKNLADDMVRNTARDLLYYAVTQDAMLIFENLSRGFGRQGKRTFMAERQYTRMEDWLTAKLAYEGLPSKTYLSKTLAQYTSKTCSNCGFTITSADYDRVLEKLKKTATGWMTTINGKELKVEGQITYYNRYKRQNVVKDLSVELDRLSEESVNNDISSWTKGRSGEALSLLKKRFSHRPVQEKFVCLNCGFETHADEQAALNIARSWLFLRSQEYKKYQTNKTTGNTDKRAFVETWQSFYRKKLKEVWKPAV

SEQ ID NO: 81 - protein, 978 aa, synthetic construct
QEIKRISKIRRRLVKDSNTKKAGKTGPMKTLLVRVMTPDLRERLENLRKKPENIPQPISNTSRANLNKLLTDYTEMKKAILHVYWEEFQKDPVGLMSRVAQPASKKIDQNKLKPEMDEKGNLTTAGFACSQCGQPLFVYKLEQVSEKGKAYTNYFGRCNVAEHEKLILLAQLKPEKDSDEAVTYSLGKFGQRALDFYSIHVTKESTHPVKPLAQIAGNRYASGPVGKALSDACMGTIASFLSKYQDIIIEHQKVVKGNQKRLESLRELAGKENLEYPSVTLPPQPHTKEGVDAYNEVIARVRMWVNLNLWQKLKLSRDDAKPLLRLKGFPSFPLVERQANEVDWWDMVCNVKKLINEKKEDGKVFWQNLAGYKRQEALRPYLSSEEDRKKGKKFARYQLGDLLLHLEKKHGEDWGKVYDEAWERIDKKVEGLSKHIKLEEERRSEDAQSKAALTDWLRAKASFVIEGLKEADKDEFCRCELKLQKWYGDLRGKPFAIEAENSILDISGFSKQYNCAFIWQKDGVKKLNLYLIINYFKGGKLRFKKIKPEAFEANRFYTVINKKSGEIVPMEVNFNFDDPNLIILPLAFGKRQGREFIWNDLLSLETGSLKLANGRVIEKTLYNRRTRQDEPALFVALTFERREVLDSSNIKPMNLIGVDRGENIPAVIALTDPEGCPLSRFKDSLGNPTHILRIGESYKEKQRTIQAKKEVEQRRAGGYSRKYASKAKNLADDMVRNTARDLLYYAVTQDAMLIFENLSRGFGRQGKRTFMAERQYTRMEDWLTAKLAYEGLPSKTYLSKTLAQYTSKTCSNCGFTITSADYDRVLEKLKKTATGWMTTINGKELKVEGQITYYNRYKRQNVVKDLSVELDRLSEESVNNDISSWTKGRSGEALSLLKKRFSHRPVQEKFVCLNCGFETHADEQAALNIARSWLFLRSQEYKKYQTNKTTGNTDKRAFVETWQSFYRKKLKEVWKPAV

SEQ ID NO: 82 - protein, 978 aa, synthetic construct
QEIKRINGIRRRLVKDSNTKKAGKTGPMKTLLVRVMTPDLRERLENLRKKPENIPQPISNTSRANLNKLLTDYTEMKKAILHVYWEEFQKDPVGLMSRVAQPASKKIDQNKLKPEMDEKGNLTTAGFACSQCGQPLFVYKLEQVSEKGKAYTNYFGRCNVAEHEKLILLAQLKPEKDSDEAVTYSLGKFGQRALDFYSIHVTKESTHPVKPLAQIAGNRYASGPVGKALSDACMGTIASFLSKYQDIIIEHQKVVKGNQKRLESLRELAGKENLEYPSVTLPPQPHTKEGVDAYNEVIARVRMWVNLNLWQKLKLSRDDAKPLLRLKGFPSFPLVERQANEVDWWDMVCNVKKLINEKKEDGKVFWQNLAGYKRQEALRPYLSSEEDRKKGKKFARYQLGDLLLHLEKKHGEDWGKVYDEAWERIDKKVEGLSKHIKLEEERRSEDAQSKAALTDWLRAKASFVIEGLKEADKDEFCRCELKLQKWYGDLRGKPFAIEAENSILDISGFSKQYNCAFIWQKDGVKKLNLYLIINYFKGGKLRFKKIKPEAFEANRFYTVINKKSGEIVPMEVNFNFDDPNLIILPLAFGKRQGREFIWNDLLSLETGSLKLANGRVIEKTLYNRRTRQDEPALFVALTFERREVLDSSNIKPMNLIGVDRGENIPAVIALTDPEGCPLSRFKDSLGNPTHILRIGESYKEKQRTIQAKKEVEQRRAGGYSRKYASKAKNLADDMVRNTARDLLYYAVTQDAMLIFENLSRGFGRQGKRTFMAERQYTRMEDWLTAKLAYEGLPSKTYLSKTLAQYTSKTCSNCGFTITSADYDRVLEKLKKTATGWMTTINGKELKVEGQITYYNRYKRQNVVKDLSVELDRLSEESVNNDISSWTKGRSGEALSLLKKRFSHRPVQEKFVCLNCGFETHADEQAALNIARSWLFLRSQEYKKYQTNKTTGNTDKRAFVETWQSFYRKKLKEVWKPAV

SEQ ID NO: 83 - protein, 979 aa, synthetic construct
QEIKRINKIRRRLVKFDSNTKKAGKTGPMKTLLVRVMTPDLRERLENLRKKPENIPQPISNTSRANLNKLLTDYTEMKKAILHVYWEEFQKDPVGLMSRVAQPASKKIDQNKLKPEMDEKGNLTTAGFACSQCGQPLFVYKLEQVSEKGKAYTNYFGRCNVAEHEKLILLAQLKPEKDSDEAVTYSLGKFGQRALDFYSIHVTKESTHPVKPLAQIAGNRYASGPVGKALSDACMGTIASFLSKYQDIIIEHQKVVKGNQKRLESLRELAGKENLEYPSVTLPPQPHTKEGVDAYNEVIARVRMWVNLNLWQKLKLSRDDAKPLLRLKGFPSFPLVERQANEVDWWDMVCNVKKLINEKKEDGKVFWQNLAGYKRQEALRPYLSSEEDRKKGKKFARYQLGDLLLHLEKKHGEDWGKVYDEAWERIDKKVEGLSKHIKLEEERRSEDAQSKAALTDWLRAKASFVIEGLKEADKDEFCRCELKLQKWYGDLRGKPFAIEAENSILDISGFSKQYNCAFIWQKDGVKKLNLYLIINYFKGGKLRFKKIKPEAFEANRFYTVINKKSGEIVPMEVNFNFDDPNLIILPLAFGKRQGREFIWNDLLSLETGSLKLANGRVIEKTLYNRRTRQDEPALFVALTFERREVLDSSNIKPMNLIGVDRGENIPAVIALTDPEGCPLSRFKDSLGNPTHILRIGESYKEKQRTIQAKKEVEQRRAGGYSRKYASKAKNLADDMVRNTARDLLYYAVTQDAMLIFENLSRGFGRQGKRTFMAERQYTRMEDWLTAKLAYEGLPSKTYLSKTLAQYTSKTCSNCGFTITSADYDRVLEKLKKTATGWMTTINGKELKVEGQITYYNRYKRQNVVKDLSVELDRLSEESVNNDISSWTKGRSGEALSLLKKRFSHRPVQEKFVCLNCGFETHADEQAALNIARSWLFLRSQEYKKYQTNKTTGNTDKRAFVETWQSFYRKKLKEVWKPAV

SEQ ID NO: 84 - protein, 979 aa, synthetic construct
QEIKRINKIRRRLVKDSFNTKKAGKTGPMKTLLVRVMTPDLRERLENLRKKPENIPQPISNTSRANLNKLLTDYTEMKKAILHVYWEEFQKDPVGLMSRVAQPASKKIDQNKLKPEMDEKGNLTTAGFACSQCGQPLFVYKLEQVSEKGKAYTNYFGRCNVAEHEKLILLAQLKPEKDSDEAVTYSLGKFGQRALDFYSIHVTKESTHPVKPLAQIAGNRYASGPVGKALSDACMGTIASFLSKYQDIIIEHQKVVKGNQKRLESLRELAGKENLEYPSVTLPPQPHTKEGVDAYNEVIARVRMWVNLNLWQKLKLSRDDAKPLLRLKGFPSFPLVERQANEVDWWDMVCNVKKLINEKKEDGKVFWQNLAGYKRQEALRPYLSSEEDRKKGKKFARYQLGDLLLHLEKKHGEDWGKVYDEAWERIDKKVEGLSKHIKLEEERRSEDAQSKAALTDWLRAKASFVIEGLKEADKDEFCRCELKLQKWYGDLRGKPFAIEAENSILDISGFSKQYNCAFIWQKDGVKKLNLYLIINYFKGGKLRFKKIKPEAFEANRFYTVINKKSGEIVPMEVNFNFDDPNLIILPLAFGKRQGREFIWNDLLSLETGSLKLANGRVIEKTLYNRRTRQDEPALFVALTFERREVLDSSNIKPMNLIGVDRGENIPAVIALTDPEGCPLSRFKDSLGNPTHILRIGESYKEKQRTIQAKKEVEQRRAGGYSRKYASKAKNLADDMVRNTARDLLYYAVTQDAMLIFENLSRGFGRQGKRTFMAERQYTRMEDWLTAKLAYEGLPSKTYLSKTLAQYTSKTCSNCGFTITSADYDRVLEKLKKTATGWMTTINGKELKVEGQITYYNRYKRQNVVKDLSVELDRLSEESVNNDISSWTKGRSGEALSLLKKRFSHRPVQEKFVCLNCGFETHADEQAALNIARSWLFLRSQEYKKYQTNKTTGNTDKRAFVETWQSFYRKKLKEVWKPAV

SEQ ID NO: 85 - protein, 978 aa, synthetic construct
QEIKRINKIRRRLVKDSNTKKAGKTGPMKTLLVPVMTPDLRERLENLRKKPENIPQPISNTSRANLNKLLTDYTEMKKAILHVYWEEFQKDPVGLMSRVAQPASKKIDQNKLKPEMDEKGNLTTAGFACSQCGQPLFVYKLEQVSEKGKAYTNYFGRCNVAEHEKLILLAQLKPEKDSDEAVTYSLGKFGQRALDFYSIHVTKESTHPVKPLAQIAGNRYASGPVGKALSDACMGTIASFLSKYQDIIIEHQKVVKGNQKRLESLRELAGKENLEYPSVTLPPQPHTKEGVDAYNEVIARVRMWVNLNLWQKLKLSRDDAKPLLRLKGFPSFPLVERQANEVDWWDMVCNVKKLINEKKEDGKVFWQNLAGYKRQEALRPYLSSEEDRKKGKKFARYQLGDLLLHLEKKHGEDWGKVYDEAWERIDKKVEGLSKHIKLEEERRSEDAQSKAALTDWLRAKASFVIEGLKEADKDEFCRCELKLQKWYGDLRGKPFAIEAENSILDISGFSKQYNCAFIWQKDGVKKLNLYLIINYFKGGKLRFKKIKPEAFEANRFYTVINKKSGEIVPMEVNFNFDDPNLIILPLAFGKRQGREFIWNDLLSLETGSLKLANGRVIEKTLYNRRTRQDEPALFVALTFERREVLDSSNIKPMNLIGVDRGENIPAVIALTDPEGCPLSRFKDSLGNPTHILRIGESYKEKQRTIQAKKEVEQRRAGGYSRKYASKAKNLADDMVRNTARDLLYYAVTQDAMLIFENLSRGFGRQGKRTFMAERQYTRMEDWLTAKLAYEGLPSKTYLSKTLAQYTSKTCSNCGFTITSADYDRVLEKLKKTATGWMTTINGKELKVEGQITYYNRYKRQNVVKDLSVELDRLSEESVNNDISSWTKGRSGEALSLLKKRFSHRPVQEKFVCLNCGFETHADEQAALNIARSWLFLRSQEYKKYQTNKTTGNTDKRAFVETWQSFYRKKLKEVWKPAV

SEQ ID NO: 86 - protein, 978 aa, synthetic construct
QEIKRINKIRRRLVKDSNTKKAGKTGPMKTLLVRVMTPDLRERLENLRKKPPNIPQPISNTSRANLNKLLTDYTEMKKAILHVYWEEFQKDPVGLMSRVAQPASKKIDQNKLKPEMDEKGNLTTAGFACSQCGQPLFVYKLEQVSEKGKAYTNYFGRCNVAEHEKLILLAQLKPEKDSDEAVTYSLGKFGQRALDFYSIHVTKESTHPVKPLAQIAGNRYASGPVGKALSDACMGTIASFLSKYQDIIIEHQKVVKGNQKRLESLRELAGKENLEYPSVTLPPQPHTKEGVDAYNEVIARVRMWVNLNLWQKLKLSRDDAKPLLRLKGFPSFPLVERQANEVDWWDMVCNVKKLINEKKEDGKVFWQNLAGYKRQEALRPYLSSEEDRKKGKKFARYQLGDLLLHLEKKHGEDWGKVYDEAWERIDKKVEGLSKHIKLEEERRSEDAQSKAALTDWLRAKASFVIEGLKEADKDEFCRCELKLQKWYGDLRGKPFAIEAENSILDISGFSKQYNCAFIWQKDGVKKLNLYLIINYFKGGKLRFKKIKPEAFEANRFYTVINKKSGEIVPMEVNFNFDDPNLIILPLAFGKRQGREFIWNDLLSLETGSLKLANGRVIEKTLYNRRTRQDEPALFVALTFERREVLDSSNIKPMNLIGVDRGENIPAVIALTDPEGCPLSRFKDSLGNPTHILRIGESYKEKQRTIQAKKEVEQRRAGGYSRKYASKAKNLADDMVRNTARDLLYYAVTQDAMLIFENLSRGFGRQGKRTFMAERQYTRMEDWLTAKLAYEGLPSKTYLSKTLAQYTSKTCSNCGFTITSADYDRVLEKLKKTATGWMTTINGKELKVEGQITYYNRYKRQNVVKDLSVELDRLSEESVNNDISSWTKGRSGEALSLLKKRFSHRPVQEKFVCLNCGFETHADEQAALNIARSWLFLRSQEYKKYQTNKTTGNTDKRAFVETWQSFYRKKLKEVWKPAV

SEQ ID NO: 87 - protein, 979 aa, synthetic construct
QEIKRINKIRRRLVKDSNTKKAGKTGPMKTLLVRVMTPDLRERLENLRKKPENIPPQPISNTSRANLNKLLTDYTEMKKAILHVYWEEFQKDPVGLMSRVAQPASKKIDQNKLKPEMDEKGNLTTAGFACSQCGQPLFVYKLEQVSEKGKAYTNYFGRCNVAEHEKLILLAQLKPEKDSDEAVTYSLGKFGQRALDFYSIHVTKESTHPVKPLAQIAGNRYASGPVGKALSDACMGTIASFLSKYQDIIIEHQKVVKGNQKRLESLRELAGKENLEYPSVTLPPQPHTKEGVDAYNEVIARVRMWVNLNLWQKLKLSRDDAKPLLRLKGFPSFPLVERQANEVDWWDMVCNVKKLINEKKEDGKVFWQNLAGYKRQEALRPYLSSEEDRKKGKKFARYQLGDLLLHLEKKHGEDWGKVYDEAWERIDKKVEGLSKHIKLEEERRSEDAQSKAALTDWLRAKASFVIEGLKEADKDEFCRCELKLQKWYGDLRGKPFAIEAENSILDISGFSKQYNCAFIWQKDGVKKLNLYLIINYFKGGKLRFKKIKPEAFEANRFYTVINKKSGEIVPMEVNFNFDDPNLIILPLAFGKRQGREFIWNDLLSLETGSLKLANGRVIEKTLYNRRTRQDEPALFVALTFERREVLDSSNIKPMNLIGVDRGENIPAVIALTDPEGCPLSRFKDSLGNPTHILRIGESYKEKQRTIQAKKEVEQRRAGGYSRKYASKAKNLADDMVRNTARDLLYYAVTQDAMLIFENLSRGFGRQGKRTFMAERQYTRMEDWLTAKLAYEGLPSKTYLSKTLAQYTSKTCSNCGFTITSADYDRVLEKLKKTATGWMTTINGKELKVEGQITYYNRYKRQNVVKDLSVELDRLSEESVNNDISSWTKGRSGEALSLLKKRFSHRPVQEKFVCLNCGFETHADEQAALNIARSWLFLRSQEYKKYQTNKTTGNTDKRAFVETWQSFYRKKLKEVWKPAV

SEQ ID NO: 88 - protein, 978 aa, synthetic construct
QEIKRINKIRRRLVKDSNTKKAGKTGPMKTLLVRVMTPDLRERLENLRKKPENIPPPISNTSRANLNKLLTDYTEMKKAILHVYWEEFQKDPVGLMSRVAQPASKKIDQNKLKPEMDEKGNLTTAGFACSQCGQPLFVYKLEQVSEKGKAYTNYFGRCNVAEHEKLILLAQLKPEKDSDEAVTYSLGKFGQRALDFYSIHVTKESTHPVKPLAQIAGNRYASGPVGKALSDACMGTIASFLSKYQDIIIEHQKVVKGNQKRLESLRELAGKENLEYPSVTLPPQPHTKEGVDAYNEVIARVRMWVNLNLWQKLKLSRDDAKPLLRLKGFPSFPLVERQANEVDWWDMVCNVKKLINEKKEDGKVFWQNLAGYKRQEALRPYLSSEEDRKKGKKFARYQLGDLLLHLEKKHGEDWGKVYDEAWERIDKKVEGLSKHIKLEEERRSEDAQSKAALTDWLRAKASFVIEGLKEADKDEFCRCELKLQKWYGDLRGKPFAIEAENSILDISGFSKQYNCAFIWQKDGVKKLNLYLIINYFKGGKLRFKKIKPEAFEANRFYTVINKKSGEIVPMEVNFNFDDPNLIILPLAFGKRQGREFIWNDLLSLETGSLKLANGRVIEKTLYNRRTRQDEPALFVALTFERREVLDSSNIKPMNLIGVDRGENIPAVIALTDPEGCPLSRFKDSLGNPTHILRIGESYKEKQRTIQAKKEVEQRRAGGYSRKYASKAKNLADDMVRNTARDLLYYAVTQDAMLIFENLSRGFGRQGKRTFMAERQYTRMEDWLTAKLAYEGLPSKTYLSKTLAQYTSKTCSNCGFTITSADYDRVLEKLKKTATGWMTTINGKELKVEGQITYYNRYKRQNVVKDLSVELDRLSEESVNNDISSWTKGRSGEALSLLKKRFSHRPVQEKFVCLNCGFETHADEQAALNIARSWLFLRSQEYKKYQTNKTTGNTDKRAFVETWQSFYRKKLKEVWKPAV

SEQ ID NO: 89 - protein, 978 aa, synthetic construct
QEIKRINKIRRRLVKDSNTKKAGKTGPMKTLLVRVMTPDLRERLENLRKKPENIPQPISNTSSANLNKLLTDYTEMKKAILHVYWEEFQKDPVGLMSRVAQPASKKIDQNKLKPEMDEKGNLTTAGFACSQCGQPLFVYKLEQVSEKGKAYTNYFGRCNVAEHEKLILLAQLKPEKDSDEAVTYSLGKFGQRALDFYSIHVTKESTHPVKPLAQIAGNRYASGPVGKALSDACMGTIASFLSKYQDIIIEHQKVVKGNQKRLESLRELAGKENLEYPSVTLPPQPHTKEGVDAYNEVIARVRMWVNLNLWQKLKLSRDDAKPLLRLKGFPSFPLVERQANEVDWWDMVCNVKKLINEKKEDGKVFWQNLAGYKRQEALRPYLSSEEDRKKGKKFARYQLGDLLLHLEKKHGEDWGKVYDEAWERIDKKVEGLSKHIKLEEERRSEDAQSKAALTDWLRAKASFVIEGLKEADKDEFCRCELKLQKWYGDLRGKPFAIEAENSILDISGFSKQYNCAFIWQKDGVKKLNLYLIINYFKGGKLRFKKIKPEAFEANRFYTVINKKSGEIVPMEVNFNFDDPNLIILPLAFGKRQGREFIWNDLLSLETGSLKLANGRVIEKTLYNRRTRQDEPALFVALTFERREVLDSSNIKPMNLIGVDRGENIPAVIALTDPEGCPLSRFKDSLGNPTHILRIGESYKEKQRTIQAKKEVEQRRAGGYSRKYASKAKNLADDMVRNTARDLLYYAVTQDAMLIFENLSRGFGRQGKRTFMAERQYTRMEDWLTAKLAYEGLPSKTYLSKTLAQYTSKTCSNCGFTITSADYDRVLEKLKKTATGWMTTINGKELKVEGQITYYNRYKRQNVVKDLSVELDRLSEESVNNDISSWTKGRSGEALSLLKKRFSHRPVQEKFVCLNCGFETHADEQAALNIARSWLFLRSQEYKKYQTNKTTGNTDKRAFVETWQSFYRKKLKEVWKPAV

SEQ ID NO: 90 - protein, 978 aa, synthetic construct
QEIKRINKIRRRLVKDSNTKKAGKTGPMKTLLVRVMTPDLRERLENLRKKPENIPQPISNTSQANLNKLLTDYTEMKKAILHVYWEEFQKDPVGLMSRVAQPASKKIDQNKLKPEMDEKGNLTTAGFACSQCGQPLFVYKLEQVSEKGKAYTNYFGRCNVAEHEKLILLAQLKPEKDSDEAVTYSLGKFGQRALDFYSIHVTKESTHPVKPLAQIAGNRYASGPVGKALSDACMGTIASFLSKYQDIIIEHQKVVKGNQKRLESLRELAGKENLEYPSVTLPPQPHTKEGVDAYNEVIARVRMWVNLNLWQKLKLSRDDAKPLLRLKGFPSFPLVERQANEVDWWDMVCNVKKLINEKKEDGKVFWQNLAGYKRQEALRPYLSSEEDRKKGKKFARYQLGDLLLHLEKKHGEDWGKVYDEAWERIDKKVEGLSKHIKLEEERRSEDAQSKAALTDWLRAKASFVIEGLKEADKDEFCRCELKLQKWYGDLRGKPFAIEAENSILDISGFSKQYNCAFIWQKDGVKKLNLYLIINYFKGGKLRFKKIKPEAFEANRFYTVINKKSGEIVPMEVNFNFDDPNLIILPLAFGKRQGREFIWNDLLSLETGSLKLANGRVIEKTLYNRRTRQDEPALFVALTFERREVLDSSNIKPMNLIGVDRGENIPAVIALTDPEGCPLSRFKDSLGNPTHILRIGESYKEKQRTIQAKKEVEQRRAGGYSRKYASKAKNLADDMVRNTARDLLYYAVTQDAMLIFENLSRGFGRQGKRTFMAERQYTRMEDWLTAKLAYEGLPSKTYLSKTLAQYTSKTCSNCGFTITSADYDRVLEKLKKTATGWMTTINGKELKVEGQITYYNRYKRQNVVKDLSVELDRLSEESVNNDISSWTKGRSGEALSLLKKRFSHRPVQEKFVCLNCGFETHADEQAALNIARSWLFLRSQEYKKYQTNKTTGNTDKRAFVETWQSFYRKKLKEVWKPAV

SEQ ID NO: 91 - protein, 978 aa, synthetic construct
QEIKRINKIRRRLVKDSNTKKAGKTGPMKTLLVRVMTPDLRERLENLRKKPENIPQPISNTSRANLNKLLTDYTEMKKAITHVYWEEFQKDPVGLMSRVAQPASKKIDQNKLKPEMDEKGNLTTAGFACSQCGQPLFVYKLEQVSEKGKAYTNYFGRCNVAEHEKLILLAQLKPEKDSDEAVTYSLGKFGQRALDFYSIHVTKESTHPVKPLAQIAGNRYASGPVGKALSDACMGTIASFLSKYQDIIIEHQKVVKGNQKRLESLRELAGKENLEYPSVTLPPQPHTKEGVDAYNEVIARVRMWVNLNLWQKLKLSRDDAKPLLRLKGFPSFPLVERQANEVDWWDMVCNVKKLINEKKEDGKVFWQNLAGYKRQEALRPYLSSEEDRKKGKKFARYQLGDLLLHLEKKHGEDWGKVYDEAWERIDKKVEGLSKHIKLEEERRSEDAQSKAALTDWLRAKASFVIEGLKEADKDEFCRCELKLQKWYGDLRGKPFAIEAENSILDISGFSKQYNCAFIWQKDGVKKLNLYLIINYFKGGKLRFKKIKPEAFEANRFYTVINKKSGEIVPMEVNFNFDDPNLIILPLAFGKRQGREFIWNDLLSLETGSLKLANGRVIEKTLYNRRTRQDEPALFVALTFERREVLDSSNIKPMNLIGVDRGENIPAVIALTDPEGCPLSRFKDSLGNPTHILRIGESYKEKQRTIQAKKEVEQRRAGGYSRKYASKAKNLADDMVRNTARDLLYYAVTQDAMLIFENLSRGFGRQGKRTFMAERQYTRMEDWLTAKLAYEGLPSKTYLSKTLAQYTSKTCSNCGFTITSADYDRVLEKLKKTATGWMTTINGKELKVEGQITYYNRYKRQNVVKDLSVELDRLSEESVNNDISSWTKGRSGEALSLLKKRFSHRPVQEKFVCLNCGFETHADEQAALNIARSWLFLRSQEYKKYQTNKTTGNTDKRAFVETWQSFYRKKLKEVWKPAV

SEQ ID NO: 92 - protein, 978 aa, synthetic construct
QEIKRINKIRRRLVKDSNTKKAGKTGPMKTLLVRVMTPDLRERLENLRKKPENIPQPISNTSRANLNKLLTDYTEMKKAILHVYGEEFQKDPVGLMSRVAQPASKKIDQNKLKPEMDEKGNLTTAGFACSQCGQPLFVYKLEQVSEKGKAYTNYFGRCNVAEHEKLILLAQLKPEKDSDEAVTYSLGKFGQRALDFYSIHVTKESTHPVKPLAQIAGNRYASGPVGKALSDACMGTIASFLSKYQDIIIEHQKVVKGNQKRLESLRELAGKENLEYPSVTLPPQPHTKEGVDAYNEVIARVRMWVNLNLWQKLKLSRDDAKPLLRLKGFPSFPLVERQANEVDWWDMVCNVKKLINEKKEDGKVFWQNLAGYKRQEALRPYLSSEEDRKKGKKFARYQLGDLLLHLEKKHGEDWGKVYDEAWERIDKKVEGLSKHIKLEEERRSEDAQSKAALTDWLRAKASFVIEGLKEADKDEFCRCELKLQKWYGDLRGKPFAIEAENSILDISGFSKQYNCAFIWQKDGVKKLNLYLIINYFKGGKLRFKKIKPEAFEANRFYTVINKKSGEIVPMEVNFNFDDPNLIILPLAFGKRQGREFIWNDLLSLETGSLKLANGRVIEKTLYNRRTRQDEPALFVALTFERREVLDSSNIKPMNLIGVDRGENIPAVIALTDPEGCPLSRFKDSLGNPTHILRIGESYKEKQRTIQAKKEVEQRRAGGYSRKYASKAKNLADDMVRNTARDLLYYAVTQDAMLIFENLSRGFGRQGKRTFMAERQYTRMEDWLTAKLAYEGLPSKTYLSKTLAQYTSKTCSNCGFTITSADYDRVLEKLKKTATGWMTTINGKELKVEGQITYYNRYKRQNVVKDLSVELDRLSEESVNNDISSWTKGRSGEALSLLKKRFSHRPVQEKFVCLNCGFETHADEQAALNIARSWLFLRSQEYKKYQTNKTTGNTDKRAFVETWQSFYRKKLKEVWKPAV

SEQ ID NO: 93 - protein, 978 aa, synthetic construct
QEIKRINKIRRRLVKDSNTKKAGKTGPMKTLLVRVMTPDLRERLENLRKKPENIPQPISNTSRANLNKLLTDYTEMKKAILHVYDEEFQKDPVGLMSRVAQPASKKIDQNKLKPEMDEKGNLTTAGFACSQCGQPLFVYKLEQVSEKGKAYTNYFGRCNVAEHEKLILLAQLKPEKDSDEAVTYSLGKFGQRALDFYSIHVTKESTHPVKPLAQIAGNRYASGPVGKALSDACMGTIASFLSKYQDIIIEHQKVVKGNQKRLESLRELAGKENLEYPSVTLPPQPHTKEGVDAYNEVIARVRMWVNLNLWQKLKLSRDDAKPLLRLKGFPSFPLVERQANEVDWWDMVCNVKKLINEKKEDGKVFWQNLAGYKRQEALRPYLSSEEDRKKGKKFARYQLGDLLLHLEKKHGEDWGKVYDEAWERIDKKVEGLSKHIKLEEERRSEDAQSKAALTDWLRAKASFVIEGLKEADKDEFCRCELKLQKWYGDLRGKPFAIEAENSILDISGFSKQYNCAFIWQKDGVKKLNLYLIINYFKGGKLRFKKIKPEAFEANRFYTVINKKSGEIVPMEVNFNFDDPNLIILPLAFGKRQGREFIWNDLLSLETGSLKLANGRVIEKTLYNRRTRQDEPALFVALTFERREVLDSSNIKPMNLIGVDRGENIPAVIALTDPEGCPLSRFKDSLGNPTHILRIGESYKEKQRTIQAKKEVEQRRAGGYSRKYASKAKNLADDMVRNTARDLLYYAVTQDAMLIFENLSRGFGRQGKRTFMAERQYTRMEDWLTAKLAYEGLPSKTYLSKTLAQYTSKTCSNCGFTITSADYDRVLEKLKKTATGWMTTINGKELKVEGQITYYNRYKRQNVVKDLSVELDRLSEESVNNDISSWTKGRSGEALSLLKKRFSHRPVQEKFVCLNCGFETHADEQAALNIARSWLFLRSQEYKKYQTNKTTGNTDKRAFVETWQSFYRKKLKEVWKPAV

SEQ ID NO: 94 - protein, 978 aa, synthetic construct
QEIKRINKIRRRLVKDSNTKKAGKTGPMKTLLVRVMTPDLRERLENLRKKPENIPQPISNTSRANLNKLLTDYTEMKKAILHVYAEEFQKDPVGLMSRVAQPASKKIDQNKLKPEMDEKGNLTTAGFACSQCGQPLFVYKLEQVSEKGKAYTNYFGRCNVAEHEKLILLAQLKPEKDSDEAVTYSLGKFGQRALDFYSIHVTKESTHPVKPLAQIAGNRYASGPVGKALSDACMGTIASFLSKYQDIIIEHQKVVKGNQKRLESLRELAGKENLEYPSVTLPPQPHTKEGVDAYNEVIARVRMWVNLNLWQKLKLSRDDAKPLLRLKGFPSFPLVERQANEVDWWDMVCNVKKLINEKKEDGKVFWQNLAGYKRQEALRPYLSSEEDRKKGKKFARYQLGDLLLHLEKKHGEDWGKVYDEAWERIDKKVEGLSKHIKLEEERRSEDAQSKAALTDWLRAKASFVIEGLKEADKDEFCRCELKLQKWYGDLRGKPFAIEAENSILDISGFSKQYNCAFIWQKDGVKKLNLYLIINYFKGGKLRFKKIKPEAFEANRFYTVINKKSGEIVPMEVNFNFDDPNLIILPLAFGKRQGREFIWNDLLSLETGSLKLANGRVIEKTLYNRRTRQDEPALFVALTFERREVLDSSNIKPMNLIGVDRGENIPAVIALTDPEGCPLSRFKDSLGNPTHILRIGESYKEKQRTIQAKKEVEQRRAGGYSRKYASKAKNLADDMVRNTARDLLYYAVTQDAMLIFENLSRGFGRQGKRTFMAERQYTRMEDWLTAKLAYEGLPSKTYLSKTLAQYTSKTCSNCGFTITSADYDRVLEKLKKTATGWMTTINGKELKVEGQITYYNRYKRQNVVKDLSVELDRLSEESVNNDISSWTKGRSGEALSLLKKRFSHRPVQEKFVCLNCGFETHADEQAALNIARSWLFLRSQEYKKYQTNKTTGNTDKRAFVETWQSFYRKKLKEVWKPAV

SEQ ID NO: 95 - protein, 978 aa, synthetic construct
QEIKRINKIRRRLVKDSNTKKAGKTGPMKTLLVRVMTPDLRERLENLRKKPENIPQPISNTSRANLNKLLTDYTEMKKAILHVYREEFQKDPVGLMSRVAQPASKKIDQNKLKPEMDEKGNLTTAGFACSQCGQPLFVYKLEQVSEKGKAYTNYFGRCNVAEHEKLILLAQLKPEKDSDEAVTYSLGKFGQRALDFYSIHVTKESTHPVKPLAQIAGNRYASGPVGKALSDACMGTIASFLSKYQDIIIEHQKVVKGNQKRLESLRELAGKENLEYPSVTLPPQPHTKEGVDAYNEVIARVRMWVNLNLWQKLKLSRDDAKPLLRLKGFPSFPLVERQANEVDWWDMVCNVKKLINEKKEDGKVFWQNLAGYKRQEALRPYLSSEEDRKKGKKFARYQLGDLLLHLEKKHGEDWGKVYDEAWERIDKKVEGLSKHIKLEEERRSEDAQSKAALTDWLRAKASFVIEGLKEADKDEFCRCELKLQKWYGDLRGKPFAIEAENSILDISGFSKQYNCAFIWQKDGVKKLNLYLIINYFKGGKLRFKKIKPEAFEANRFYTVINKKSGEIVPMEVNFNFDDPNLIILPLAFGKRQGREFIWNDLLSLETGSLKLANGRVIEKTLYNRRTRQDEPALFVALTFERREVLDSSNIKPMNLIGVDRGENIPAVIALTDPEGCPLSRFKDSLGNPTHILRIGESYKEKQRTIQAKKEVEQRRAGGYSRKYASKAKNLADDMVRNTARDLLYYAVTQDAMLIFENLSRGFGRQGKRTFMAERQYTRMEDWLTAKLAYEGLPSKTYLSKTLAQYTSKTCSNCGFTITSADYDRVLEKLKKTATGWMTTINGKELKVEGQITYYNRYKRQNVVKDLSVELDRLSEESVNNDISSWTKGRSGEALSLLKKRFSHRPVQEKFVCLNCGFETHADEQAALNIARSWLFLRSQEYKKYQTNKTTGNTDKRAFVETWQSFYRKKLKEVWKPAV

SEQ ID NO: 96 - protein, 978 aa, synthetic construct
QEIKRINKIRRRLVKDSNTKKAGKTGPMKTLLVRVMTPDLRERLENLRKKPENIPQPISNTSRANLNKLLTDYTEMKKAILHVYWEEFQKDPVGLMSRVAQPASKKIDQNKLKPEMDEKGNLTTAGFACSQCGQPLFVYKLEQVSEKGKAYTNYFGRCNVAEHEKLIKLAQLKPEKDSDEAVTYSLGKFGQRALDFYSIHVTKESTHPVKPLAQIAGNRYASGPVGKALSDACMGTIASFLSKYQDIIIEHQKVVKGNQKRLESLRELAGKENLEYPSVTLPPQPHTKEGVDAYNEVIARVRMWVNLNLWQKLKLSRDDAKPLLRLKGFPSFPLVERQANEVDWWDMVCNVKKLINEKKEDGKVFWQNLAGYKRQEALRPYLSSEEDRKKGKKFARYQLGDLLLHLEKKHGEDWGKVYDEAWERIDKKVEGLSKHIKLEEERRSEDAQSKAALTDWLRAKASFVIEGLKEADKDEFCRCELKLQKWYGDLRGKPFAIEAENSILDISGFSKQYNCAFIWQKDGVKKLNLYLIINYFKGGKLRFKKIKPEAFEANRFYTVINKKSGEIVPMEVNFNFDDPNLIILPLAFGKRQGREFIWNDLLSLETGSLKLANGRVIEKTLYNRRTRQDEPALFVALTFERREVLDSSNIKPMNLIGVDRGENIPAVIALTDPEGCPLSRFKDSLGNPTHILRIGESYKEKQRTIQAKKEVEQRRAGGYSRKYASKAKNLADDMVRNTARDLLYYAVTQDAMLIFENLSRGFGRQGKRTFMAERQYTRMEDWLTAKLAYEGLPSKTYLSKTLAQYTSKTCSNCGFTITSADYDRVLEKLKKTATGWMTTINGKELKVEGQITYYNRYKRQNVVKDLSVELDRLSEESVNNDISSWTKGRSGEALSLLKKRFSHRPVQEKFVCLNCGFETHADEQAALNIARSWLFLRSQEYKKYQTNKTTGNTDKRAFVETWQSFYRKKLKEVWKPAV

SEQ ID NO: 97 - protein, 978 aa, synthetic construct
QEIKRINKIRRRLVKDSNTKKAGKTGPMKTLLVRVMTPDLRERLENLRKKPENIPQPISNTSRANLNKLLTDYTEMKKAILHVYWEEFQKDPVGLMSRVAQPASKKIDQNKLKPEMDEKGNLTTAGFACSQCGQPLFVYKLEQVSEKGKAYTNYFGRCNVAEHEKLILLYQLKPEKDSDEAVTYSLGKFGQRALDFYSIHVTKESTHPVKPLAQIAGNRYASGPVGKALSDACMGTIASFLSKYQDIIIEHQKVVKGNQKRLESLRELAGKENLEYPSVTLPPQPHTKEGVDAYNEVIARVRMWVNLNLWQKLKLSRDDAKPLLRLKGFPSFPLVERQANEVDWWDMVCNVKKLINEKKEDGKVFWQNLAGYKRQEALRPYLSSEEDRKKGKKFARYQLGDLLLHLEKKHGEDWGKVYDEAWERIDKKVEGLSKHIKLEEERRSEDAQSKAALTDWLRAKASFVIEGLKEADKDEFCRCELKLQKWYGDLRGKPFAIEAENSILDISGFSKQYNCAFIWQKDGVKKLNLYLIINYFKGGKLRFKKIKPEAFEANRFYTVINKKSGEIVPMEVNFNFDDPNLIILPLAFGKRQGREFIWNDLLSLETGSLKLANGRVIEKTLYNRRTRQDEPALFVALTFERREVLDSSNIKPMNLIGVDRGENIPAVIALTDPEGCPLSRFKDSLGNPTHILRIGESYKEKQRTIQAKKEVEQRRAGGYSRKYASKAKNLADDMVRNTARDLLYYAVTQDAMLIFENLSRGFGRQGKRTFMAERQYTRMEDWLTAKLAYEGLPSKTYLSKTLAQYTSKTCSNCGFTITSADYDRVLEKLKKTATGWMTTINGKELKVEGQITYYNRYKRQNVVKDLSVELDRLSEESVNNDISSWTKGRSGEALSLLKKRFSHRPVQEKFVCLNCGFETHADEQAALNIARSWLFLRSQEYKKYQTNKTTGNTDKRAFVETWQSFYRKKLKEVWKPAV

SEQ ID NO: 98 - protein, 978 aa, synthetic construct
QEIKRINKIRRRLVKDSNTKKAGKTGPMKTLLVRVMTPDLRERLENLRKKPENIPQPISNTSRANLNKLLTDYTEMKKAILHVYWEEFQKDPVGLMSRVAQPASKKIDQNKLKPEMDEKGNLTTAGFACSQCGQPLFVYKLEQVSEKGKAYTNYFGRCNVAEHEKLILLSQLKPEKDSDEAVTYSLGKFGQRALDFYSIHVTKESTHPVKPLAQIAGNRYASGPVGKALSDACMGTIASFLSKYQDIIIEHQKVVKGNQKRLESLRELAGKENLEYPSVTLPPQPHTKEGVDAYNEVIARVRMWVNLNLWQKLKLSRDDAKPLLRLKGFPSFPLVERQANEVDWWDMVCNVKKLINEKKEDGKVFWQNLAGYKRQEALRPYLSSEEDRKKGKKFARYQLGDLLLHLEKKHGEDWGKVYDEAWERIDKKVEGLSKHIKLEEERRSEDAQSKAALTDWLRAKASFVIEGLKEADKDEFCRCELKLQKWYGDLRGKPFAIEAENSILDISGFSKQYNCAFIWQKDGVKKLNLYLIINYFKGGKLRFKKIKPEAFEANRFYTVINKKSGEIVPMEVNFNFDDPNLIILPLAFGKRQGREFIWNDLLSLETGSLKLANGRVIEKTLYNRRTRQDEPALFVALTFERREVLDSSNIKPMNLIGVDRGENIPAVIALTDPEGCPLSRFKDSLGNPTHILRIGESYKEKQRTIQAKKEVEQRRAGGYSRKYASKAKNLADDMVRNTARDLLYYAVTQDAMLIFENLSRGFGRQGKRTFMAERQYTRMEDWLTAKLAYEGLPSKTYLSKTLAQYTSKTCSNCGFTITSADYDRVLEKLKKTATGWMTTINGKELKVEGQITYYNRYKRQNVVKDLSVELDRLSEESVNNDISSWTKGRSGEALSLLKKRFSHRPVQEKFVCLNCGFETHADEQAALNIARSWLFLRSQEYKKYQTNKTTGNTDKRAFVETWQSFYRKKLKEVWKPAV

SEQ ID NO: 99 - protein, 978 aa, synthetic construct
QEIKRINKIRRRLVKDSNTKKAGKTGPMKTLLVRVMTPDLRERLENLRKKPENIPQPISNTSRANLNKLLTDYTEMKKAILHVYWEEFQKDPVGLMSRVAQPASKKIDQNKLKPEMDEKGNLTTAGFACSQCGQPLFVYKLEQVSEKGKAYTNYFGRCNVAEHEKLILLAQLKPPKDSDEAVTYSLGKFGQRALDFYSIHVTKESTHPVKPLAQIAGNRYASGPVGKALSDACMGTIASFLSKYQDIIIEHQKVVKGNQKRLESLRELAGKENLEYPSVTLPPQPHTKEGVDAYNEVIARVRMWVNLNLWQKLKLSRDDAKPLLRLKGFPSFPLVERQANEVDWWDMVCNVKKLINEKKEDGKVFWQNLAGYKRQEALRPYLSSEEDRKKGKKFARYQLGDLLLHLEKKHGEDWGKVYDEAWERIDKKVEGLSKHIKLEEERRSEDAQSKAALTDWLRAKASFVIEGLKEADKDEFCRCELKLQKWYGDLRGKPFAIEAENSILDISGFSKQYNCAFIWQKDGVKKLNLYLIINYFKGGKLRFKKIKPEAFEANRFYTVINKKSGEIVPMEVNFNFDDPNLIILPLAFGKRQGREFIWNDLLSLETGSLKLANGRVIEKTLYNRRTRQDEPALFVALTFERREVLDSSNIKPMNLIGVDRGENIPAVIALTDPEGCPLSRFKDSLGNPTHILRIGESYKEKQRTIQAKKEVEQRRAGGYSRKYASKAKNLADDMVRNTARDLLYYAVTQDAMLIFENLSRGFGRQGKRTFMAERQYTRMEDWLTAKLAYEGLPSKTYLSKTLAQYTSKTCSNCGFTITSADYDRVLEKLKKTATGWMTTINGKELKVEGQITYYNRYKRQNVVKDLSVELDRLSEESVNNDISSWTKGRSGEALSLLKKRFSHRPVQEKFVCLNCGFETHADEQAALNIARSWLFLRSQEYKKYQTNKTTGNTDKRAFVETWQSFYRKKLKEVWKPAV

SEQ ID NO: 100 - protein, 977 aa, synthetic construct
QEIKRINKIRRRLVKDSNTKKAGKTGPMKTLLVRVMTPDLRERLENLRKKPENIPQPISNTSRANLNKLLTDYTEMKKAILHVYWEEFQKDPVGLMSRVAQPASKKIDQNKLKPEMDEKGNLTTAGFACSQCGQPLFVYKLEQVSEKGKAYTNYFGRCNVAEHEKLILLAQLKPEKDSDEAVTYSLGKFGQRALDFYSIHVTKESTHPVKPLAQIAGNRYASPVGKALSDACMGTIASFLSKYQDIIIEHQKVVKGNQKRLESLRELAGKENLEYPSVTLPPQPHTKEGVDAYNEVIARVRMWVNLNLWQKLKLSRDDAKPLLRLKGFPSFPLVERQANEVDWWDMVCNVKKLINEKKEDGKVFWQNLAGYKRQEALRPYLSSEEDRKKGKKFARYQLGDLLLHLEKKHGEDWGKVYDEAWERIDKKVEGLSKHIKLEEERRSEDAQSKAALTDWLRAKASFVIEGLKEADKDEFCRCELKLQKWYGDLRGKPFAIEAENSILDISGFSKQYNCAFIWQKDGVKKLNLYLIINYFKGGKLRFKKIKPEAFEANRFYTVINKKSGEIVPMEVNFNFDDPNLIILPLAFGKRQGREFIWNDLLSLETGSLKLANGRVIEKTLYNRRTRQDEPALFVALTFERREVLDSSNIKPMNLIGVDRGENIPAVIALTDPEGCPLSRFKDSLGNPTHILRIGESYKEKQRTIQAKKEVEQRRAGGYSRKYASKAKNLADDMVRNTARDLLYYAVTQDAMLIFENLSRGFGRQGKRTFMAERQYTRMEDWLTAKLAYEGLPSKTYLSKTLAQYTSKTCSNCGFTITSADYDRVLEKLKKTATGWMTTINGKELKVEGQITYYNRYKRQNVVKDLSVELDRLSEESVNNDISSWTKGRSGEALSLLKKRFSHRPVQEKFVCLNCGFETHADEQAALNIARSWLFLRSQEYKKYQTNKTTGNTDKRAFVETWQSFYRKKLKEVWKPAV

SEQ ID NO: 101 - protein, 978 aa, synthetic construct
QEIKRINKIRRRLVKDSNTKKAGKTGPMKTLLVRVMTPDLRERLENLRKKPENIPQPISNTSRANLNKLLTDYTEMKKAILHVYWEEFQKDPVGLMSRVAQPASKKIDQNKLKPEMDEKGNLTTAGFACSQCGQPLFVYKLEQVSEKGKAYTNYFGRCNVAEHEKLILLAQLKPEKDSDEAVTYSLGKFGQRALDFYSIHVTKESTHPVKPLAQIAGNRYASGPVGKALSDACMGTIASFLSKYQDIIIEHQKVVKGNQKRLESLRELAGKENLEYPSVTLPPQPHTGEGVDAYNEVIARVRMWVNLNLWQKLKLSRDDAKPLLRLKGFPSFPLVERQANEVDWWDMVCNVKKLINEKKEDGKVFWQNLAGYKRQEALRPYLSSEEDRKKGKKFARYQLGDLLLHLEKKHGEDWGKVYDEAWERIDKKVEGLSKHIKLEEERRSEDAQSKAALTDWLRAKASFVIEGLKEADKDEFCRCELKLQKWYGDLRGKPFAIEAENSILDISGFSKQYNCAFIWQKDGVKKLNLYLIINYFKGGKLRFKKIKPEAFEANRFYTVINKKSGEIVPMEVNFNFDDPNLIILPLAFGKRQGREFIWNDLLSLETGSLKLANGRVIEKTLYNRRTRQDEPALFVALTFERREVLDSSNIKPMNLIGVDRGENIPAVIALTDPEGCPLSRFKDSLGNPTHILRIGESYKEKQRTIQAKKEVEQRRAGGYSRKYASKAKNLADDMVRNTARDLLYYAVTQDAMLIFENLSRGFGRQGKRTFMAERQYTRMEDWLTAKLAYEGLPSKTYLSKTLAQYTSKTCSNCGFTITSADYDRVLEKLKKTATGWMTTINGKELKVEGQITYYNRYKRQNVVKDLSVELDRLSEESVNNDISSWTKGRSGEALSLLKKRFSHRPVQEKFVCLNCGFETHADEQAALNIARSWLFLRSQEYKKYQTNKTTGNTDKRAFVETWQSFYRKKLKEVWKPAV

SEQ ID NO: 102 - protein, 978 aa, synthetic construct
QEIKRINKIRRRLVKDSNTKKAGKTGPMKTLLVRVMTPDLRERLENLRKKPENIPQPISNTSRANLNKLLTDYTEMKKAILHVYWEEFQKDPVGLMSRVAQPASKKIDQNKLKPEMDEKGNLTTAGFACSQCGQPLFVYKLEQVSEKGKAYTNYFGRCNVAEHEKLILLAQLKPEKDSDEAVTYSLGKFGQRALDFYSIHVTKESTHPVKPLAQIAGNRYASGPVGKALSDACMGTIASFLSKYQDIIIEHQKVVKGNQKRLESLRELAGKENLEYPSVTLPPQPHTSEGVDAYNEVIARVRMWVNLNLWQKLKLSRDDAKPLLRLKGFPSFPLVERQANEVDWWDMVCNVKKLINEKKEDGKVFWQNLAGYKRQEALRPYLSSEEDRKKGKKFARYQLGDLLLHLEKKHGEDWGKVYDEAWERIDKKVEGLSKHIKLEEERRSEDAQSKAALTDWLRAKASFVIEGLKEADKDEFCRCELKLQKWYGDLRGKPFAIEAENSILDISGFSKQYNCAFIWQKDGVKKLNLYLIINYFKGGKLRFKKIKPEAFEANRFYTVINKKSGEIVPMEVNFNFDDPNLIILPLAFGKRQGREFIWNDLLSLETGSLKLANGRVIEKTLYNRRTRQDEPALFVALTFERREVLDSSNIKPMNLIGVDRGENIPAVIALTDPEGCPLSRFKDSLGNPTHILRIGESYKEKQRTIQAKKEVEQRRAGGYSRKYASKAKNLADDMVRNTARDLLYYAVTQDAMLIFENLSRGFGRQGKRTFMAERQYTRMEDWLTAKLAYEGLPSKTYLSKTLAQYTSKTCSNCGFTITSADYDRVLEKLKKTATGWMTTINGKELKVEGQITYYNRYKRQNVVKDLSVELDRLSEESVNNDISSWTKGRSGEALSLLKKRFSHRPVQEKFVCLNCGFETHADEQAALNIARSWLFLRSQEYKKYQTNKTTGNTDKRAFVETWQSFYRKKLKEVWKPAV

SEQ ID NO: 103 - protein, 978 aa, synthetic construct
QEIKRINKIRRRLVKDSNTKKAGKTGPMKTLLVRVMTPDLRERLENLRKKPENIPQPISNTSRANLNKLLTDYTEMKKAILHVYWEEFQKDPVGLMSRVAQPASKKIDQNKLKPEMDEKGNLTTAGFACSQCGQPLFVYKLEQVSEKGKAYTNYFGRCNVAEHEKLILLAQLKPEKDSDEAVTYSLGKFGQRALDFYSIHVTKESTHPVKPLAQIAGNRYASGPVGKALSDACMGTIASFLSKYQDIIIEHQKVVKGNQKRLESLRELAGKENLEYPSVTLPPQPHTKEGLDAYNEVIARVRMWVNLNLWQKLKLSRDDAKPLLRLKGFPSFPLVERQANEVDWWDMVCNVKKLINEKKEDGKVFWQNLAGYKRQEALRPYLSSEEDRKKGKKFARYQLGDLLLHLEKKHGEDWGKVYDEAWERIDKKVEGLSKHIKLEEERRSEDAQSKAALTDWLRAKASFVIEGLKEADKDEFCRCELKLQKWYGDLRGKPFAIEAENSILDISGFSKQYNCAFIWQKDGVKKLNLYLIINYFKGGKLRFKKIKPEAFEANRFYTVINKKSGEIVPMEVNFNFDDPNLIILPLAFGKRQGREFIWNDLLSLETGSLKLANGRVIEKTLYNRRTRQDEPALFVALTFERREVLDSSNIKPMNLIGVDRGENIPAVIALTDPEGCPLSRFKDSLGNPTHILRIGESYKEKQRTIQAKKEVEQRRAGGYSRKYASKAKNLADDMVRNTARDLLYYAVTQDAMLIFENLSRGFGRQGKRTFMAERQYTRMEDWLTAKLAYEGLPSKTYLSKTLAQYTSKTCSNCGFTITSADYDRVLEKLKKTATGWMTTINGKELKVEGQITYYNRYKRQNVVKDLSVELDRLSEESVNNDISSWTKGRSGEALSLLKKRFSHRPVQEKFVCLNCGFETHADEQAALNIARSWLFLRSQEYKKYQTNKTTGNTDKRAFVETWQSFYRKKLKEVWKPAV

SEQ ID NO: 104 - protein, 978 aa, synthetic construct
QEIKRINKIRRRLVKDSNTKKAGKTGPMKTLLVRVMTPDLRERLENLRKKPENIPQPISNTSRANLNKLLTDYTEMKKAILHVYWEEFQKDPVGLMSRVAQPASKKIDQNKLKPEMDEKGNLTTAGFACSQCGQPLFVYKLEQVSEKGKAYTNYFGRCNVAEHEKLILLAQLKPEKDSDEAVTYSLGKFGQRALDFYSIHVTKESTHPVKPLAQIAGNRYASGPVGKALSDACMGTIASFLSKYQDIIIEHQKVVKGNQKRLESLRELAGKENLEYPSVTLPPQPHTKEGVDAYNEVIARVRTWVNLNLWQKLKLSRDDAKPLLRLKGFPSFPLVERQANEVDWWDMVCNVKKLINEKKEDGKVFWQNLAGYKRQEALRPYLSSEEDRKKGKKFARYQLGDLLLHLEKKHGEDWGKVYDEAWERIDKKVEGLSKHIKLEEERRSEDAQSKAALTDWLRAKASFVIEGLKEADKDEFCRCELKLQKWYGDLRGKPFAIEAENSILDISGFSKQYNCAFIWQKDGVKKLNLYLIINYFKGGKLRFKKIKPEAFEANRFYTVINKKSGEIVPMEVNFNFDDPNLIILPLAFGKRQGREFIWNDLLSLETGSLKLANGRVIEKTLYNRRTRQDEPALFVALTFERREVLDSSNIKPMNLIGVDRGENIPAVIALTDPEGCPLSRFKDSLGNPTHILRIGESYKEKQRTIQAKKEVEQRRAGGYSRKYASKAKNLADDMVRNTARDLLYYAVTQDAMLIFENLSRGFGRQGKRTFMAERQYTRMEDWLTAKLAYEGLPSKTYLSKTLAQYTSKTCSNCGFTITSADYDRVLEKLKKTATGWMTTINGKELKVEGQITYYNRYKRQNVVKDLSVELDRLSEESVNNDISSWTKGRSGEALSLLKKRFSHRPVQEKFVCLNCGFETHADEQAALNIARSWLFLRSQEYKKYQTNKTTGNTDKRAFVETWQSFYRKKLKEVWKPAV

SEQ ID NO: 105 - protein, 978 aa, synthetic construct
QEIKRINKIRRRLVKDSNTKKAGKTGPMKTLLVRVMTPDLRERLENLRKKPENIPQPISNTSRANLNKLLTDYTEMKKAILHVYWEEFQKDPVGLMSRVAQPASKKIDQNKLKPEMDEKGNLTTAGFACSQCGQPLFVYKLEQVSEKGKAYTNYFGRCNVAEHEKLILLAQLKPEKDSDEAVTYSLGKFGQRALDFYSIHVTKESTHPVKPLAQIAGNRYASGPVGKALSDACMGTIASFLSKYQDIIIEHQKVVKGNQKRLESLRELAGKENLEYPSVTLPPQPHTKEGVDAYNEVIARVRWWVNLNLWQKLKLSRDDAKPLLRLKGFPSFPLVERQANEVDWWDMVCNVKKLINEKKEDGKVFWQNLAGYKRQEALRPYLSSEEDRKKGKKFARYQLGDLLLHLEKKHGEDWGKVYDEAWERIDKKVEGLSKHIKLEEERRSEDAQSKAALTDWLRAKASFVIEGLKEADKDEFCRCELKLQKWYGDLRGKPFAIEAENSILDISGFSKQYNCAFIWQKDGVKKLNLYLIINYFKGGKLRFKKIKPEAFEANRFYTVINKKSGEIVPMEVNFNFDDPNLIILPLAFGKRQGREFIWNDLLSLETGSLKLANGRVIEKTLYNRRTRQDEPALFVALTFERREVLDSSNIKPMNLIGVDRGENIPAVIALTDPEGCPLSRFKDSLGNPTHILRIGESYKEKQRTIQAKKEVEQRRAGGYSRKYASKAKNLADDMVRNTARDLLYYAVTQDAMLIFENLSRGFGRQGKRTFMAERQYTRMEDWLTAKLAYEGLPSKTYLSKTLAQYTSKTCSNCGFTITSADYDRVLEKLKKTATGWMTTINGKELKVEGQITYYNRYKRQNVVKDLSVELDRLSEESVNNDISSWTKGRSGEALSLLKKRFSHRPVQEKFVCLNCGFETHADEQAALNIARSWLFLRSQEYKKYQTNKTTGNTDKRAFVETWQSFYRKKLKEVWKPAV

SEQ ID NO: 106 - protein, 978 aa, synthetic construct
QEIKRINKIRRRLVKDSNTKKAGKTGPMKTLLVRVMTPDLRERLENLRKKPENIPQPISNTSRANLNKLLTDYTEMKKAILHVYWEEFQKDPVGLMSRVAQPASKKIDQNKLKPEMDEKGNLTTAGFACSQCGQPLFVYKLEQVSEKGKAYTNYFGRCNVAEHEKLILLAQLKPEKDSDEAVTYSLGKFGQRALDFYSIHVTKESTHPVKPLAQIAGNRYASGPVGKALSDACMGTIASFLSKYQDIIIEHQKVVKGNQKRLESLRELAGKENLEYPSVTLPPQPHTKEGVDAYNEVIARVRMWVNLNLWQKLKLSRDDAKPLLRLKNFPSFPLVERQANEVDWWDMVCNVKKLINEKKEDGKVFWQNLAGYKRQEALRPYLSSEEDRKKGKKFARYQLGDLLLHLEKKHGEDWGKVYDEAWERIDKKVEGLSKHIKLEEERRSEDAQSKAALTDWLRAKASFVIEGLKEADKDEFCRCELKLQKWYGDLRGKPFAIEAENSILDISGFSKQYNCAFIWQKDGVKKLNLYLIINYFKGGKLRFKKIKPEAFEANRFYTVINKKSGEIVPMEVNFNFDDPNLIILPLAFGKRQGREFIWNDLLSLETGSLKLANGRVIEKTLYNRRTRQDEPALFVALTFERREVLDSSNIKPMNLIGVDRGENIPAVIALTDPEGCPLSRFKDSLGNPTHILRIGESYKEKQRTIQAKKEVEQRRAGGYSRKYASKAKNLADDMVRNTARDLLYYAVTQDAMLIFENLSRGFGRQGKRTFMAERQYTRMEDWLTAKLAYEGLPSKTYLSKTLAQYTSKTCSNCGFTITSADYDRVLEKLKKTATGWMTTINGKELKVEGQITYYNRYKRQNVVKDLSVELDRLSEESVNNDISSWTKGRSGEALSLLKKRFSHRPVQEKFVCLNCGFETHADEQAALNIARSWLFLRSQEYKKYQTNKTTGNTDKRAFVETWQSFYRKKLKEVWKPAV

SEQ ID NO: 107 - protein, 978 aa, synthetic construct
QEIKRINKIRRRLVKDSNTKKAGKTGPMKTLLVRVMTPDLRERLENLRKKPENIPQPISNTSRANLNKLLTDYTEMKKAILHVYWEEFQKDPVGLMSRVAQPASKKIDQNKLKPEMDEKGNLTTAGFACSQCGQPLFVYKLEQVSEKGKAYTNYFGRCNVAEHEKLILLAQLKPEKDSDEAVTYSLGKFGQRALDFYSIHVTKESTHPVKPLAQIAGNRYASGPVGKALSDACMGTIASFLSKYQDIIIEHQKVVKGNQKRLESLRELAGKENLEYPSVTLPPQPHTKEGVDAYNEVIARVRMWVNLNLWQKLKLSRDDAKPLLRLKGFPQFPLVERQANEVDWWDMVCNVKKLINEKKEDGKVFWQNLAGYKRQEALRPYLSSEEDRKKGKKFARYQLGDLLLHLEKKHGEDWGKVYDEAWERIDKKVEGLSKHIKLEEERRSEDAQSKAALTDWLRAKASFVIEGLKEADKDEFCRCELKLQKWYGDLRGKPFAIEAENSILDISGFSKQYNCAFIWQKDGVKKLNLYLIINYFKGGKLRFKKIKPEAFEANRFYTVINKKSGEIVPMEVNFNFDDPNLIILPLAFGKRQGREFIWNDLLSLETGSLKLANGRVIEKTLYNRRTRQDEPALFVALTFERREVLDSSNIKPMNLIGVDRGENIPAVIALTDPEGCPLSRFKDSLGNPTHILRIGESYKEKQRTIQAKKEVEQRRAGGYSRKYASKAKNLADDMVRNTARDLLYYAVTQDAMLIFENLSRGFGRQGKRTFMAERQYTRMEDWLTAKLAYEGLPSKTYLSKTLAQYTSKTCSNCGFTITSADYDRVLEKLKKTATGWMTTINGKELKVEGQITYYNRYKRQNVVKDLSVELDRLSEESVNNDISSWTKGRSGEALSLLKKRFSHRPVQEKFVCLNCGFETHADEQAALNIARSWLFLRSQEYKKYQTNKTTGNTDKRAFVETWQSFYRKKLKEVWKPAV

SEQ ID NO: 108 - protein, 979 aa, synthetic construct
QEIKRINKIRRRLVKDSNTKKAGKTGPMKTLLVRVMTPDLRERLENLRKKPENIPQPISNTSRANLNKLLTDYTEMKKAILHVYWEEFQKDPVGLMSRVAQPASKKIDQNKLKPEMDEKGNLTTAGFACSQCGQPLFVYKLEQVSEKGKAYTNYFGRCNVAEHEKLILLAQLKPEKDSDEAVTYSLGKFGQRALDFYSIHVTKESTHPVKPLAQIAGNRYASGPVGKALSDACMGTIASFLSKYQDIIIEHQKVVKGNQKRLESLRELAGKENLEYPSVTLPPQPHTKEGVDAYNEVIARVRMWVNLNLWQKLKLSRDDAKPLLRLKGFPSFPALVERQANEVDWWDMVCNVKKLINEKKEDGKVFWQNLAGYKRQEALRPYLSSEEDRKKGKKFARYQLGDLLLHLEKKHGEDWGKVYDEAWERIDKKVEGLSKHIKLEEERRSEDAQSKAALTDWLRAKASFVIEGLKEADKDEFCRCELKLQKWYGDLRGKPFAIEAENSILDISGFSKQYNCAFIWQKDGVKKLNLYLIINYFKGGKLRFKKIKPEAFEANRFYTVINKKSGEIVPMEVNFNFDDPNLIILPLAFGKRQGREFIWNDLLSLETGSLKLANGRVIEKTLYNRRTRQDEPALFVALTFERREVLDSSNIKPMNLIGVDRGENIPAVIALTDPEGCPLSRFKDSLGNPTHILRIGESYKEKQRTIQAKKEVEQRRAGGYSRKYASKAKNLADDMVRNTARDLLYYAVTQDAMLIFENLSRGFGRQGKRTFMAERQYTRMEDWLTAKLAYEGLPSKTYLSKTLAQYTSKTCSNCGFTITSADYDRVLEKLKKTATGWMTTINGKELKVEGQITYYNRYKRQNVVKDLSVELDRLSEESVNNDISSWTKGRSGEALSLLKKRFSHRPVQEKFVCLNCGFETHADEQAALNIARSWLFLRSQEYKKYQTNKTTGNTDKRAFVETWQSFYRKKLKEVWKPAV

SEQ ID NO: 109 - protein, 977 aa, synthetic construct
QEIKRINKIRRRLVKDSNTKKAGKTGPMKTLLVRVMTPDLRERLENLRKKPENIPQPISNTSRANLNKLLTDYTEMKKAILHVYWEEFQKDPVGLMSRVAQPASKKIDQNKLKPEMDEKGNLTTAGFACSQCGQPLFVYKLEQVSEKGKAYTNYFGRCNVAEHEKLILLAQLKPEKDSDEAVTYSLGKFGQRALDFYSIHVTKESTHPVKPLAQIAGNRYASGPVGKALSDACMGTIASFLSKYQDIIIEHQKVVKGNQKRLESLRELAGKENLEYPSVTLPPQPHTKEGVDAYNEVIARVRMWVNLNLWQKLKLSRDDAKPLLRLKGFPSFPLERQANEVDWWDMVCNVKKLINEKKEDGKVFWQNLAGYKRQEALRPYLSSEEDRKKGKKFARYQLGDLLLHLEKKHGEDWGKVYDEAWERIDKKVEGLSKHIKLEEERRSEDAQSKAALTDWLRAKASFVIEGLKEADKDEFCRCELKLQKWYGDLRGKPFAIEAENSILDISGFSKQYNCAFIWQKDGVKKLNLYLIINYFKGGKLRFKKIKPEAFEANRFYTVINKKSGEIVPMEVNFNFDDPNLIILPLAFGKRQGREFIWNDLLSLETGSLKLANGRVIEKTLYNRRTRQDEPALFVALTFERREVLDSSNIKPMNLIGVDRGENIPAVIALTDPEGCPLSRFKDSLGNPTHILRIGESYKEKQRTIQAKKEVEQRRAGGYSRKYASKAKNLADDMVRNTARDLLYYAVTQDAMLIFENLSRGFGRQGKRTFMAERQYTRMEDWLTAKLAYEGLPSKTYLSKTLAQYTSKTCSNCGFTITSADYDRVLEKLKKTATGWMTTINGKELKVEGQITYYNRYKRQNVVKDLSVELDRLSEESVNNDISSWTKGRSGEALSLLKKRFSHRPVQEKFVCLNCGFETHADEQAALNIARSWLFLRSQEYKKYQTNKTTGNTDKRAFVETWQSFYRKKLKEVWKPAV

SEQ ID NO: 110 - protein, 978 aa, synthetic construct
QEIKRINKIRRRLVKDSNTKKAGKTGPMKTLLVRVMTPDLRERLENLRKKPENIPQPISNTSRANLNKLLTDYTEMKKAILHVYWEEFQKDPVGLMSRVAQPASKKIDQNKLKPEMDEKGNLTTAGFACSQCGQPLFVYKLEQVSEKGKAYTNYFGRCNVAEHEKLILLAQLKPEKDSDEAVTYSLGKFGQRALDFYSIHVTKESTHPVKPLAQIAGNRYASGPVGKALSDACMGTIASFLSKYQDIIIEHQKVVKGNQKRLESLRELAGKENLEYPSVTLPPQPHTKEGVDAYNEVIARVRMWVNLNLWQKLKLSRDDAKPLLRLKGFPSFPLVPRQANEVDWWDMVCNVKKLINEKKEDGKVFWQNLAGYKRQEALRPYLSSEEDRKKGKKFARYQLGDLLLHLEKKHGEDWGKVYDEAWERIDKKVEGLSKHIKLEEERRSEDAQSKAALTDWLRAKASFVIEGLKEADKDEFCRCELKLQKWYGDLRGKPFAIEAENSILDISGFSKQYNCAFIWQKDGVKKLNLYLIINYFKGGKLRFKKIKPEAFEANRFYTVINKKSGEIVPMEVNFNFDDPNLIILPLAFGKRQGREFIWNDLLSLETGSLKLANGRVIEKTLYNRRTRQDEPALFVALTFERREVLDSSNIKPMNLIGVDRGENIPAVIALTDPEGCPLSRFKDSLGNPTHILRIGESYKEKQRTIQAKKEVEQRRAGGYSRKYASKAKNLADDMVRNTARDLLYYAVTQDAMLIFENLSRGFGRQGKRTFMAERQYTRMEDWLTAKLAYEGLPSKTYLSKTLAQYTSKTCSNCGFTITSADYDRVLEKLKKTATGWMTTINGKELKVEGQITYYNRYKRQNVVKDLSVELDRLSEESVNNDISSWTKGRSGEALSLLKKRFSHRPVQEKFVCLNCGFETHADEQAALNIARSWLFLRSQEYKKYQTNKTTGNTDKRAFVETWQSFYRKKLKEVWKPAV

SEQ ID NO: 111 - protein, 977 aa, synthetic construct
QEIKRINKIRRRLVKDSNTKKAGKTGPMKTLLVRVMTPDLRERLENLRKKPENIPQPISNTSRANLNKLLTDYTEMKKAILHVYWEEFQKDPVGLMSRVAQPASKKIDQNKLKPEMDEKGNLTTAGFACSQCGQPLFVYKLEQVSEKGKAYTNYFGRCNVAEHEKLILLAQLKPEKDSDEAVTYSLGKFGQRALDFYSIHVTKESTHPVKPLAQIAGNRYASGPVGKALSDACMGTIASFLSKYQDIIIEHQKVVKGNQKRLESLRELAGKENLEYPSVTLPPQPHTKEGVDAYNEVIARVRMWVNLNLWQKLKLSRDDAKPLLRLKGFPSFPLVRQANEVDWWDMVCNVKKLINEKKEDGKVFWQNLAGYKRQEALRPYLSSEEDRKKGKKFARYQLGDLLLHLEKKHGEDWGKVYDEAWERIDKKVEGLSKHIKLEEERRSEDAQSKAALTDWLRAKASFVIEGLKEADKDEFCRCELKLQKWYGDLRGKPFAIEAENSILDISGFSKQYNCAFIWQKDGVKKLNLYLIINYFKGGKLRFKKIKPEAFEANRFYTVINKKSGEIVPMEVNFNFDDPNLIILPLAFGKRQGREFIWNDLLSLETGSLKLANGRVIEKTLYNRRTRQDEPALFVALTFERREVLDSSNIKPMNLIGVDRGENIPAVIALTDPEGCPLSRFKDSLGNPTHILRIGESYKEKQRTIQAKKEVEQRRAGGYSRKYASKAKNLADDMVRNTARDLLYYAVTQDAMLIFENLSRGFGRQGKRTFMAERQYTRMEDWLTAKLAYEGLPSKTYLSKTLAQYTSKTCSNCGFTITSADYDRVLEKLKKTATGWMTTINGKELKVEGQITYYNRYKRQNVVKDLSVELDRLSEESVNNDISSWTKGRSGEALSLLKKRFSHRPVQEKFVCLNCGFETHADEQAALNIARSWLFLRSQEYKKYQTNKTTGNTDKRAFVETWQSFYRKKLKEVWKPAV

SEQ ID NO: 112 - protein, 978 aa, synthetic construct
QEIKRINKIRRRLVKDSNTKKAGKTGPMKTLLVRVMTPDLRERLENLRKKPENIPQPISNTSRANLNKLLTDYTEMKKAILHVYWEEFQKDPVGLMSRVAQPASKKIDQNKLKPEMDEKGNLTTAGFACSQCGQPLFVYKLEQVSEKGKAYTNYFGRCNVAEHEKLILLAQLKPEKDSDEAVTYSLGKFGQRALDFYSIHVTKESTHPVKPLAQIAGNRYASGPVGKALSDACMGTIASFLSKYQDIIIEHQKVVKGNQKRLESLRELAGKENLEYPSVTLPPQPHTKEGVDAYNEVIARVRMWVNLNLWQKLKLSRDDAKPLLRLKGFPSFPLVLRQANEVDWWDMVCNVKKLINEKKEDGKVFWQNLAGYKRQEALRPYLSSEEDRKKGKKFARYQLGDLLLHLEKKHGEDWGKVYDEAWERIDKKVEGLSKHIKLEEERRSEDAQSKAALTDWLRAKASFVIEGLKEADKDEFCRCELKLQKWYGDLRGKPFAIEAENSILDISGFSKQYNCAFIWQKDGVKKLNLYLIINYFKGGKLRFKKIKPEAFEANRFYTVINKKSGEIVPMEVNFNFDDPNLIILPLAFGKRQGREFIWNDLLSLETGSLKLANGRVIEKTLYNRRTRQDEPALFVALTFERREVLDSSNIKPMNLIGVDRGENIPAVIALTDPEGCPLSRFKDSLGNPTHILRIGESYKEKQRTIQAKKEVEQRRAGGYSRKYASKAKNLADDMVRNTARDLLYYAVTQDAMLIFENLSRGFGRQGKRTFMAERQYTRMEDWLTAKLAYEGLPSKTYLSKTLAQYTSKTCSNCGFTITSADYDRVLEKLKKTATGWMTTINGKELKVEGQITYYNRYKRQNVVKDLSVELDRLSEESVNNDISSWTKGRSGEALSLLKKRFSHRPVQEKFVCLNCGFETHADEQAALNIARSWLFLRSQEYKKYQTNKTTGNTDKRAFVETWQSFYRKKLKEVWKPAV

SEQ ID NO: 113 - protein, 978 aa, synthetic construct
QEIKRINKIRRRLVKDSNTKKAGKTGPMKTLLVRVMTPDLRERLENLRKKPENIPQPISNTSRANLNKLLTDYTEMKKAILHVYWEEFQKDPVGLMSRVAQPASKKIDQNKLKPEMDEKGNLTTAGFACSQCGQPLFVYKLEQVSEKGKAYTNYFGRCNVAEHEKLILLAQLKPEKDSDEAVTYSLGKFGQRALDFYSIHVTKESTHPVKPLAQIAGNRYASGPVGKALSDACMGTIASFLSKYQDIIIEHQKVVKGNQKRLESLRELAGKENLEYPSVTLPPQPHTKEGVDAYNEVIARVRMWVNLNLWQKLKLSRDDAKPLLRLKGFPSFPLVRRQANEVDWWDMVCNVKKLINEKKEDGKVFWQNLAGYKRQEALRPYLSSEEDRKKGKKFARYQLGDLLLHLEKKHGEDWGKVYDEAWERIDKKVEGLSKHIKLEEERRSEDAQSKAALTDWLRAKASFVIEGLKEADKDEFCRCELKLQKWYGDLRGKPFAIEAENSILDISGFSKQYNCAFIWQKDGVKKLNLYLIINYFKGGKLRFKKIKPEAFEANRFYTVINKKSGEIVPMEVNFNFDDPNLIILPLAFGKRQGREFIWNDLLSLETGSLKLANGRVIEKTLYNRRTRQDEPALFVALTFERREVLDSSNIKPMNLIGVDRGENIPAVIALTDPEGCPLSRFKDSLGNPTHILRIGESYKEKQRTIQAKKEVEQRRAGGYSRKYASKAKNLADDMVRNTARDLLYYAVTQDAMLIFENLSRGFGRQGKRTFMAERQYTRMEDWLTAKLAYEGLPSKTYLSKTLAQYTSKTCSNCGFTITSADYDRVLEKLKKTATGWMTTINGKELKVEGQITYYNRYKRQNVVKDLSVELDRLSEESVNNDISSWTKGRSGEALSLLKKRFSHRPVQEKFVCLNCGFETHADEQAALNIARSWLFLRSQEYKKYQTNKTTGNTDKRAFVETWQSFYRKKLKEVWKPAV

SEQ ID NO: 114 - protein, 979 aa, synthetic construct
QEIKRINKIRRRLVKDSNTKKAGKTGPMKTLLVRVMTPDLRERLENLRKKPENIPQPISNTSRANLNKLLTDYTEMKKAILHVYWEEFQKDPVGLMSRVAQPASKKIDQNKLKPEMDEKGNLTTAGFACSQCGQPLFVYKLEQVSEKGKAYTNYFGRCNVAEHEKLILLAQLKPEKDSDEAVTYSLGKFGQRALDFYSIHVTKESTHPVKPLAQIAGNRYASGPVGKALSDACMGTIASFLSKYQDIIIEHQKVVKGNQKRLESLRELAGKENLEYPSVTLPPQPHTKEGVDAYNEVIARVRMWVNLNLWQKLKLSRDDAKPLLRLKGFPSFPLVERQQANEVDWWDMVCNVKKLINEKKEDGKVFWQNLAGYKRQEALRPYLSSEEDRKKGKKFARYQLGDLLLHLEKKHGEDWGKVYDEAWERIDKKVEGLSKHIKLEEERRSEDAQSKAALTDWLRAKASFVIEGLKEADKDEFCRCELKLQKWYGDLRGKPFAIEAENSILDISGFSKQYNCAFIWQKDGVKKLNLYLIINYFKGGKLRFKKIKPEAFEANRFYTVINKKSGEIVPMEVNFNFDDPNLIILPLAFGKRQGREFIWNDLLSLETGSLKLANGRVIEKTLYNRRTRQDEPALFVALTFERREVLDSSNIKPMNLIGVDRGENIPAVIALTDPEGCPLSRFKDSLGNPTHILRIGESYKEKQRTIQAKKEVEQRRAGGYSRKYASKAKNLADDMVRNTARDLLYYAVTQDAMLIFENLSRGFGRQGKRTFMAERQYTRMEDWLTAKLAYEGLPSKTYLSKTLAQYTSKTCSNCGFTITSADYDRVLEKLKKTATGWMTTINGKELKVEGQITYYNRYKRQNVVKDLSVELDRLSEESVNNDISSWTKGRSGEALSLLKKRFSHRPVQEKFVCLNCGFETHADEQAALNIARSWLFLRSQEYKKYQTNKTTGNTDKRAFVETWQSFYRKKLKEVWKPAV

SEQ ID NO: 115 - protein, 979 aa, synthetic construct
QEIKRINKIRRRLVKDSNTKKAGKTGPMKTLLVRVMTPDLRERLENLRKKPENIPQPISNTSRANLNKLLTDYTEMKKAILHVYWEEFQKDPVGLMSRVAQPASKKIDQNKLKPEMDEKGNLTTAGFACSQCGQPLFVYKLEQVSEKGKAYTNYFGRCNVAEHEKLILLAQLKPEKDSDEAVTYSLGKFGQRALDFYSIHVTKESTHPVKPLAQIAGNRYASGPVGKALSDACMGTIASFLSKYQDIIIEHQKVVKGNQKRLESLRELAGKENLEYPSVTLPPQPHTKEGVDAYNEVIARVRMWVNLNLWQKLKLSRDDAKPLLRLKGFPSFPLVERQANHEVDWWDMVCNVKKLINEKKEDGKVFWQNLAGYKRQEALRPYLSSEEDRKKGKKFARYQLGDLLLHLEKKHGEDWGKVYDEAWERIDKKVEGLSKHIKLEEERRSEDAQSKAALTDWLRAKASFVIEGLKEADKDEFCRCELKLQKWYGDLRGKPFAIEAENSILDISGFSKQYNCAFIWQKDGVKKLNLYLIINYFKGGKLRFKKIKPEAFEANRFYTVINKKSGEIVPMEVNFNFDDPNLIILPLAFGKRQGREFIWNDLLSLETGSLKLANGRVIEKTLYNRRTRQDEPALFVALTFERREVLDSSNIKPMNLIGVDRGENIPAVIALTDPEGCPLSRFKDSLGNPTHILRIGESYKEKQRTIQAKKEVEQRRAGGYSRKYASKAKNLADDMVRNTARDLLYYAVTQDAMLIFENLSRGFGRQGKRTFMAERQYTRMEDWLTAKLAYEGLPSKTYLSKTLAQYTSKTCSNCGFTITSADYDRVLEKLKKTATGWMTTINGKELKVEGQITYYNRYKRQNVVKDLSVELDRLSEESVNNDISSWTKGRSGEALSLLKKRFSHRPVQEKFVCLNCGFETHADEQAALNIARSWLFLRSQEYKKYQTNKTTGNTDKRAFVETWQSFYRKKLKEVWKPAV

SEQ ID NO: 116 - protein, 979 aa, synthetic construct
QEIKRINKIRRRLVKDSNTKKAGKTGPMKTLLVRVMTPDLRERLENLRKKPENIPQPISNTSRANLNKLLTDYTEMKKAILHVYWEEFQKDPVGLMSRVAQPASKKIDQNKLKPEMDEKGNLTTAGFACSQCGQPLFVYKLEQVSEKGKAYTNYFGRCNVAEHEKLILLAQLKPEKDSDEAVTYSLGKFGQRALDFYSIHVTKESTHPVKPLAQIAGNRYASGPVGKALSDACMGTIASFLSKYQDIIIEHQKVVKGNQKRLESLRELAGKENLEYPSVTLPPQPHTKEGVDAYNEVIARVRMWVNLNLWQKLKLSRDDAKPLLRLKGFPSFPLVERQANAEVDWWDMVCNVKKLINEKKEDGKVFWQNLAGYKRQEALRPYLSSEEDRKKGKKFARYQLGDLLLHLEKKHGEDWGKVYDEAWERIDKKVEGLSKHIKLEEERRSEDAQSKAALTDWLRAKASFVIEGLKEADKDEFCRCELKLQKWYGDLRGKPFAIEAENSILDISGFSKQYNCAFIWQKDGVKKLNLYLIINYFKGGKLRFKKIKPEAFEANRFYTVINKKSGEIVPMEVNFNFDDPNLIILPLAFGKRQGREFIWNDLLSLETGSLKLANGRVIEKTLYNRRTRQDEPALFVALTFERREVLDSSNIKPMNLIGVDRGENIPAVIALTDPEGCPLSRFKDSLGNPTHILRIGESYKEKQRTIQAKKEVEQRRAGGYSRKYASKAKNLADDMVRNTARDLLYYAVTQDAMLIFENLSRGFGRQGKRTFMAERQYTRMEDWLTAKLAYEGLPSKTYLSKTLAQYTSKTCSNCGFTITSADYDRVLEKLKKTATGWMTTINGKELKVEGQITYYNRYKRQNVVKDLSVELDRLSEESVNNDISSWTKGRSGEALSLLKKRFSHRPVQEKFVCLNCGFETHADEQAALNIARSWLFLRSQEYKKYQTNKTTGNTDKRAFVETWQSFYRKKLKEVWKPAV

SEQ ID NO: 117 - protein, 979 aa, synthetic construct
QEIKRINKIRRRLVKDSNTKKAGKTGPMKTLLVRVMTPDLRERLENLRKKPENIPQPISNTSRANLNKLLTDYTEMKKAILHVYWEEFQKDPVGLMSRVAQPASKKIDQNKLKPEMDEKGNLTTAGFACSQCGQPLFVYKLEQVSEKGKAYTNYFGRCNVAEHEKLILLAQLKPEKDSDEAVTYSLGKFGQRALDFYSIHVTKESTHPVKPLAQIAGNRYASGPVGKALSDACMGTIASFLSKYQDIIIEHQKVVKGNQKRLESLRELAGKENLEYPSVTLPPQPHTKEGVDAYNEVIARVRMWVNLNLWQKLKLSRDDAKPLLRLKGFPSFPLVERQANEVDDWWDMVCNVKKLINEKKEDGKVFWQNLAGYKRQEALRPYLSSEEDRKKGKKFARYQLGDLLLHLEKKHGEDWGKVYDEAWERIDKKVEGLSKHIKLEEERRSEDAQSKAALTDWLRAKASFVIEGLKEADKDEFCRCELKLQKWYGDLRGKPFAIEAENSILDISGFSKQYNCAFIWQKDGVKKLNLYLIINYFKGGKLRFKKIKPEAFEANRFYTVINKKSGEIVPMEVNFNFDDPNLIILPLAFGKRQGREFIWNDLLSLETGSLKLANGRVIEKTLYNRRTRQDEPALFVALTFERREVLDSSNIKPMNLIGVDRGENIPAVIALTDPEGCPLSRFKDSLGNPTHILRIGESYKEKQRTIQAKKEVEQRRAGGYSRKYASKAKNLADDMVRNTARDLLYYAVTQDAMLIFENLSRGFGRQGKRTFMAERQYTRMEDWLTAKLAYEGLPSKTYLSKTLAQYTSKTCSNCGFTITSADYDRVLEKLKKTATGWMTTINGKELKVEGQITYYNRYKRQNVVKDLSVELDRLSEESVNNDISSWTKGRSGEALSLLKKRFSHRPVQEKFVCLNCGFETHADEQAALNIARSWLFLRSQEYKKYQTNKTTGNTDKRAFVETWQSFYRKKLKEVWKPAV

SEQ ID NO: 118 - protein, 979 aa, synthetic construct
QEIKRINKIRRRLVKDSNTKKAGKTGPMKTLLVRVMTPDLRERLENLRKKPENIPQPISNTSRANLNKLLTDYTEMKKAILHVYWEEFQKDPVGLMSRVAQPASKKIDQNKLKPEMDEKGNLTTAGFACSQCGQPLFVYKLEQVSEKGKAYTNYFGRCNVAEHEKLILLAQLKPEKDSDEAVTYSLGKFGQRALDFYSIHVTKESTHPVKPLAQIAGNRYASGPVGKALSDACMGTIASFLSKYQDIIIEHQKVVKGNQKRLESLRELAGKENLEYPSVTLPPQPHTKEGVDAYNEVIARVRMWVNLNLWQKLKLSRDDAKPLLRLKGFPSFPLVERQANEVDWWPDMVCNVKKLINEKKEDGKVFWQNLAGYKRQEALRPYLSSEEDRKKGKKFARYQLGDLLLHLEKKHGEDWGKVYDEAWERIDKKVEGLSKHIKLEEERRSEDAQSKAALTDWLRAKASFVIEGLKEADKDEFCRCELKLQKWYGDLRGKPFAIEAENSILDISGFSKQYNCAFIWQKDGVKKLNLYLIINYFKGGKLRFKKIKPEAFEANRFYTVINKKSGEIVPMEVNFNFDDPNLIILPLAFGKRQGREFIWNDLLSLETGSLKLANGRVIEKTLYNRRTRQDEPALFVALTFERREVLDSSNIKPMNLIGVDRGENIPAVIALTDPEGCPLSRFKDSLGNPTHILRIGESYKEKQRTIQAKKEVEQRRAGGYSRKYASKAKNLADDMVRNTARDLLYYAVTQDAMLIFENLSRGFGRQGKRTFMAERQYTRMEDWLTAKLAYEGLPSKTYLSKTLAQYTSKTCSNCGFTITSADYDRVLEKLKKTATGWMTTINGKELKVEGQITYYNRYKRQNVVKDLSVELDRLSEESVNNDISSWTKGRSGEALSLLKKRFSHRPVQEKFVCLNCGFETHADEQAALNIARSWLFLRSQEYKKYQTNKTTGNTDKRAFVETWQSFYRKKLKEVWKPAV

SEQ ID NO: 119 - protein, 978 aa, synthetic construct
QEIKRINKIRRRLVKDSNTKKAGKTGPMKTLLVRVMTPDLRERLENLRKKPENIPQPISNTSRANLNKLLTDYTEMKKAILHVYWEEFQKDPVGLMSRVAQPASKKIDQNKLKPEMDEKGNLTTAGFACSQCGQPLFVYKLEQVSEKGKAYTNYFGRCNVAEHEKLILLAQLKPEKDSDEAVTYSLGKFGQRALDFYSIHVTKESTHPVKPLAQIAGNRYASGPVGKALSDACMGTIASFLSKYQDIIIEHQKVVKGNQKRLESLRELAGKENLEYPSVTLPPQPHTKEGVDAYNEVIARVRMWVNLNLWQKLKLSRDDAKPLLRLKGFPSFPLVERQANEVDWWDMVCNVKKLINEKKEDGKVFWQNLAGYKRQEALRPYLSSEEDRKKGKKFARTQLGDLLLHLEKKHGEDWGKVYDEAWERIDKKVEGLSKHIKLEEERRSEDAQSKAALTDWLRAKASFVIEGLKEADKDEFCRCELKLQKWYGDLRGKPFAIEAENSILDISGFSKQYNCAFIWQKDGVKKLNLYLIINYFKGGKLRFKKIKPEAFEANRFYTVINKKSGEIVPMEVNFNFDDPNLIILPLAFGKRQGREFIWNDLLSLETGSLKLANGRVIEKTLYNRRTRQDEPALFVALTFERREVLDSSNIKPMNLIGVDRGENIPAVIALTDPEGCPLSRFKDSLGNPTHILRIGESYKEKQRTIQAKKEVEQRRAGGYSRKYASKAKNLADDMVRNTARDLLYYAVTQDAMLIFENLSRGFGRQGKRTFMAERQYTRMEDWLTAKLAYEGLPSKTYLSKTLAQYTSKTCSNCGFTITSADYDRVLEKLKKTATGWMTTINGKELKVEGQITYYNRYKRQNVVKDLSVELDRLSEESVNNDISSWTKGRSGEALSLLKKRFSHRPVQEKFVCLNCGFETHADEQAALNIARSWLFLRSQEYKKYQTNKTTGNTDKRAFVETWQSFYRKKLKEVWKPAV

SEQ ID NO: 120 - protein, 978 aa, synthetic construct
QEIKRINKIRRRLVKDSNTKKAGKTGPMKTLLVRVMTPDLRERLENLRKKPENIPQPISNTSRANLNKLLTDYTEMKKAILHVYWEEFQKDPVGLMSRVAQPASKKIDQNKLKPEMDEKGNLTTAGFACSQCGQPLFVYKLEQVSEKGKAYTNYFGRCNVAEHEKLILLAQLKPEKDSDEAVTYSLGKFGQRALDFYSIHVTKESTHPVKPLAQIAGNRYASGPVGKALSDACMGTIASFLSKYQDIIIEHQKVVKGNQKRLESLRELAGKENLEYPSVTLPPQPHTKEGVDAYNEVIARVRMWVNLNLWQKLKLSRDDAKPLLRLKGFPSFPLVERQANEVDWWDMVCNVKKLINEKKEDGKVFWQNLAGYKRQEALRPYLSSEEDRKKGKKFARYQLMDLLLHLEKKHGEDWGKVYDEAWERIDKKVEGLSKHIKLEEERRSEDAQSKAALTDWLRAKASFVIEGLKEADKDEFCRCELKLQKWYGDLRGKPFAIEAENSILDISGFSKQYNCAFIWQKDGVKKLNLYLIINYFKGGKLRFKKIKPEAFEANRFYTVINKKSGEIVPMEVNFNFDDPNLIILPLAFGKRQGREFIWNDLLSLETGSLKLANGRVIEKTLYNRRTRQDEPALFVALTFERREVLDSSNIKPMNLIGVDRGENIPAVIALTDPEGCPLSRFKDSLGNPTHILRIGESYKEKQRTIQAKKEVEQRRAGGYSRKYASKAKNLADDMVRNTARDLLYYAVTQDAMLIFENLSRGFGRQGKRTFMAERQYTRMEDWLTAKLAYEGLPSKTYLSKTLAQYTSKTCSNCGFTITSADYDRVLEKLKKTATGWMTTINGKELKVEGQITYYNRYKRQNVVKDLSVELDRLSEESVNNDISSWTKGRSGEALSLLKKRFSHRPVQEKFVCLNCGFETHADEQAALNIARSWLFLRSQEYKKYQTNKTTGNTDKRAFVETWQSFYRKKLKEVWKPAV

SEQ ID NO: 121 - protein, 978 aa, synthetic construct
QEIKRINKIRRRLVKDSNTKKAGKTGPMKTLLVRVMTPDLRERLENLRKKPENIPQPISNTSRANLNKLLTDYTEMKKAILHVYWEEFQKDPVGLMSRVAQPASKKIDQNKLKPEMDEKGNLTTAGFACSQCGQPLFVYKLEQVSEKGKAYTNYFGRCNVAEHEKLILLAQLKPEKDSDEAVTYSLGKFGQRALDFYSIHVTKESTHPVKPLAQIAGNRYASGPVGKALSDACMGTIASFLSKYQDIIIEHQKVVKGNQKRLESLRELAGKENLEYPSVTLPPQPHTKEGVDAYNEVIARVRMWVNLNLWQKLKLSRDDAKPLLRLKGFPSFPLVERQANEVDWWDMVCNVKKLINEKKEDGKVFWQNLAGYKRQEALRPYLSSEEDRKKGKKFARYQLGDLLNHLEKKHGEDWGKVYDEAWERIDKKVEGLSKHIKLEEERRSEDAQSKAALTDWLRAKASFVIEGLKEADKDEFCRCELKLQKWYGDLRGKPFAIEAENSILDISGFSKQYNCAFIWQKDGVKKLNLYLIINYFKGGKLRFKKIKPEAFEANRFYTVINKKSGEIVPMEVNFNFDDPNLIILPLAFGKRQGREFIWNDLLSLETGSLKLANGRVIEKTLYNRRTRQDEPALFVALTFERREVLDSSNIKPMNLIGVDRGENIPAVIALTDPEGCPLSRFKDSLGNPTHILRIGESYKEKQRTIQAKKEVEQRRAGGYSRKYASKAKNLADDMVRNTARDLLYYAVTQDAMLIFENLSRGFGRQGKRTFMAERQYTRMEDWLTAKLAYEGLPSKTYLSKTLAQYTSKTCSNCGFTITSADYDRVLEKLKKTATGWMTTINGKELKVEGQITYYNRYKRQNVVKDLSVELDRLSEESVNNDISSWTKGRSGEALSLLKKRFSHRPVQEKFVCLNCGFETHADEQAALNIARSWLFLRSQEYKKYQTNKTTGNTDKRAFVETWQSFYRKKLKEVWKPAV

SEQ ID NO: 122 - protein, 978 aa, synthetic construct
QEIKRINKIRRRLVKDSNTKKAGKTGPMKTLLVRVMTPDLRERLENLRKKPENIPQPISNTSRANLNKLLTDYTEMKKAILHVYWEEFQKDPVGLMSRVAQPASKKIDQNKLKPEMDEKGNLTTAGFACSQCGQPLFVYKLEQVSEKGKAYTNYFGRCNVAEHEKLILLAQLKPEKDSDEAVTYSLGKFGQRALDFYSIHVTKESTHPVKPLAQIAGNRYASGPVGKALSDACMGTIASFLSKYQDIIIEHQKVVKGNQKRLESLRELAGKENLEYPSVTLPPQPHTKEGVDAYNEVIARVRMWVNLNLWQKLKLSRDDAKPLLRLKGFPSFPLVERQANEVDWWDMVCNVKKLINEKKEDGKVFWQNLAGYKRQEALRPYLSSEEDRKKGKKFARYQLGDLLWHLEKKHGEDWGKVYDEAWERIDKKVEGLSKHIKLEEERRSEDAQSKAALTDWLRAKASFVIEGLKEADKDEFCRCELKLQKWYGDLRGKPFAIEAENSILDISGFSKQYNCAFIWQKDGVKKLNLYLIINYFKGGKLRFKKIKPEAFEANRFYTVINKKSGEIVPMEVNFNFDDPNLIILPLAFGKRQGREFIWNDLLSLETGSLKLANGRVIEKTLYNRRTRQDEPALFVALTFERREVLDSSNIKPMNLIGVDRGENIPAVIALTDPEGCPLSRFKDSLGNPTHILRIGESYKEKQRTIQAKKEVEQRRAGGYSRKYASKAKNLADDMVRNTARDLLYYAVTQDAMLIFENLSRGFGRQGKRTFMAERQYTRMEDWLTAKLAYEGLPSKTYLSKTLAQYTSKTCSNCGFTITSADYDRVLEKLKKTATGWMTTINGKELKVEGQITYYNRYKRQNVVKDLSVELDRLSEESVNNDISSWTKGRSGEALSLLKKRFSHRPVQEKFVCLNCGFETHADEQAALNIARSWLFLRSQEYKKYQTNKTTGNTDKRAFVETWQSFYRKKLKEVWKPAV

SEQ ID NO: 123 - protein, 978 aa, synthetic construct
QEIKRINKIRRRLVKDSNTKKAGKTGPMKTLLVRVMTPDLRERLENLRKKPENIPQPISNTSRANLNKLLTDYTEMKKAILHVYWEEFQKDPVGLMSRVAQPASKKIDQNKLKPEMDEKGNLTTAGFACSQCGQPLFVYKLEQVSEKGKAYTNYFGRCNVAEHEKLILLAQLKPEKDSDEAVTYSLGKFGQRALDFYSIHVTKESTHPVKPLAQIAGNRYASGPVGKALSDACMGTIASFLSKYQDIIIEHQKVVKGNQKRLESLRELAGKENLEYPSVTLPPQPHTKEGVDAYNEVIARVRMWVNLNLWQKLKLSRDDAKPLLRLKGFPSFPLVERQANEVDWWDMVCNVKKLINEKKEDGKVFWQNLAGYKRQEALRPYLSSEEDRKKGKKFARYQLGDLLLHLYKKHGEDWGKVYDEAWERIDKKVEGLSKHIKLEEERRSEDAQSKAALTDWLRAKASFVIEGLKEADKDEFCRCELKLQKWYGDLRGKPFAIEAENSILDISGFSKQYNCAFIWQKDGVKKLNLYLIINYFKGGKLRFKKIKPEAFEANRFYTVINKKSGEIVPMEVNFNFDDPNLIILPLAFGKRQGREFIWNDLLSLETGSLKLANGRVIEKTLYNRRTRQDEPALFVALTFERREVLDSSNIKPMNLIGVDRGENIPAVIALTDPEGCPLSRFKDSLGNPTHILRIGESYKEKQRTIQAKKEVEQRRAGGYSRKYASKAKNLADDMVRNTARDLLYYAVTQDAMLIFENLSRGFGRQGKRTFMAERQYTRMEDWLTAKLAYEGLPSKTYLSKTLAQYTSKTCSNCGFTITSADYDRVLEKLKKTATGWMTTINGKELKVEGQITYYNRYKRQNVVKDLSVELDRLSEESVNNDISSWTKGRSGEALSLLKKRFSHRPVQEKFVCLNCGFETHADEQAALNIARSWLFLRSQEYKKYQTNKTTGNTDKRAFVETWQSFYRKKLKEVWKPAV

SEQ ID NO: 124 - protein, 978 aa, synthetic construct
QEIKRINKIRRRLVKDSNTKKAGKTGPMKTLLVRVMTPDLRERLENLRKKPENIPQPISNTSRANLNKLLTDYTEMKKAILHVYWEEFQKDPVGLMSRVAQPASKKIDQNKLKPEMDEKGNLTTAGFACSQCGQPLFVYKLEQVSEKGKAYTNYFGRCNVAEHEKLILLAQLKPEKDSDEAVTYSLGKFGQRALDFYSIHVTKESTHPVKPLAQIAGNRYASGPVGKALSDACMGTIASFLSKYQDIIIEHQKVVKGNQKRLESLRELAGKENLEYPSVTLPPQPHTKEGVDAYNEVIARVRMWVNLNLWQKLKLSRDDAKPLLRLKGFPSFPLVERQANEVDWWDMVCNVKKLINEKKEDGKVFWQNLAGYKRQEALRPYLSSEEDRKKGKKFARYQLGDLLLHLEKKHPEDWGKVYDEAWERIDKKVEGLSKHIKLEEERRSEDAQSKAALTDWLRAKASFVIEGLKEADKDEFCRCELKLQKWYGDLRGKPFAIEAENSILDISGFSKQYNCAFIWQKDGVKKLNLYLIINYFKGGKLRFKKIKPEAFEANRFYTVINKKSGEIVPMEVNFNFDDPNLIILPLAFGKRQGREFIWNDLLSLETGSLKLANGRVIEKTLYNRRTRQDEPALFVALTFERREVLDSSNIKPMNLIGVDRGENIPAVIALTDPEGCPLSRFKDSLGNPTHILRIGESYKEKQRTIQAKKEVEQRRAGGYSRKYASKAKNLADDMVRNTARDLLYYAVTQDAMLIFENLSRGFGRQGKRTFMAERQYTRMEDWLTAKLAYEGLPSKTYLSKTLAQYTSKTCSNCGFTITSADYDRVLEKLKKTATGWMTTINGKELKVEGQITYYNRYKRQNVVKDLSVELDRLSEESVNNDISSWTKGRSGEALSLLKKRFSHRPVQEKFVCLNCGFETHADEQAALNIARSWLFLRSQEYKKYQTNKTTGNTDKRAFVETWQSFYRKKLKEVWKPAV

SEQ ID NO: 125 - protein, 979 aa, synthetic construct
QEIKRINKIRRRLVKDSNTKKAGKTGPMKTLLVRVMTPDLRERLENLRKKPENIPQPISNTSRANLNKLLTDYTEMKKAILHVYWEEFQKDPVGLMSRVAQPASKKIDQNKLKPEMDEKGNLTTAGFACSQCGQPLFVYKLEQVSEKGKAYTNYFGRCNVAEHEKLILLAQLKPEKDSDEAVTYSLGKFGQRALDFYSIHVTKESTHPVKPLAQIAGNRYASGPVGKALSDACMGTIASFLSKYQDIIIEHQKVVKGNQKRLESLRELAGKENLEYPSVTLPPQPHTKEGVDAYNEVIARVRMWVNLNLWQKLKLSRDDAKPLLRLKGFPSFPLVERQANEVDWWDMVCNVKKLINEKKEDGKVFWQNLAGYKRQEALRPYLSSEEDRKKGKKFARYQLGDLLLHLEKKHEGEDWGKVYDEAWERIDKKVEGLSKHIKLEEERRSEDAQSKAALTDWLRAKASFVIEGLKEADKDEFCRCELKLQKWYGDLRGKPFAIEAENSILDISGFSKQYNCAFIWQKDGVKKLNLYLIINYFKGGKLRFKKIKPEAFEANRFYTVINKKSGEIVPMEVNFNFDDPNLIILPLAFGKRQGREFIWNDLLSLETGSLKLANGRVIEKTLYNRRTRQDEPALFVALTFERREVLDSSNIKPMNLIGVDRGENIPAVIALTDPEGCPLSRFKDSLGNPTHILRIGESYKEKQRTIQAKKEVEQRRAGGYSRKYASKAKNLADDMVRNTARDLLYYAVTQDAMLIFENLSRGFGRQGKRTFMAERQYTRMEDWLTAKLAYEGLPSKTYLSKTLAQYTSKTCSNCGFTITSADYDRVLEKLKKTATGWMTTINGKELKVEGQITYYNRYKRQNVVKDLSVELDRLSEESVNNDISSWTKGRSGEALSLLKKRFSHRPVQEKFVCLNCGFETHADEQAALNIARSWLFLRSQEYKKYQTNKTTGNTDKRAFVETWQSFYRKKLKEVWKPAV

SEQ ID NO: 126 - protein, 979 aa, synthetic construct
QEIKRINKIRRRLVKDSNTKKAGKTGPMKTLLVRVMTPDLRERLENLRKKPENIPQPISNTSRANLNKLLTDYTEMKKAILHVYWEEFQKDPVGLMSRVAQPASKKIDQNKLKPEMDEKGNLTTAGFACSQCGQPLFVYKLEQVSEKGKAYTNYFGRCNVAEHEKLILLAQLKPEKDSDEAVTYSLGKFGQRALDFYSIHVTKESTHPVKPLAQIAGNRYASGPVGKALSDACMGTIASFLSKYQDIIIEHQKVVKGNQKRLESLRELAGKENLEYPSVTLPPQPHTKEGVDAYNEVIARVRMWVNLNLWQKLKLSRDDAKPLLRLKGFPSFPLVERQANEVDWWDMVCNVKKLINEKKEDGKVFWQNLAGYKRQEALRPYLSSEEDRKKGKKFARYQLGDLLLHLEKKHGERDWGKVYDEAWERIDKKVEGLSKHIKLEEERRSEDAQSKAALTDWLRAKASFVIEGLKEADKDEFCRCELKLQKWYGDLRGKPFAIEAENSILDISGFSKQYNCAFIWQKDGVKKLNLYLIINYFKGGKLRFKKIKPEAFEANRFYTVINKKSGEIVPMEVNFNFDDPNLIILPLAFGKRQGREFIWNDLLSLETGSLKLANGRVIEKTLYNRRTRQDEPALFVALTFERREVLDSSNIKPMNLIGVDRGENIPAVIALTDPEGCPLSRFKDSLGNPTHILRIGESYKEKQRTIQAKKEVEQRRAGGYSRKYASKAKNLADDMVRNTARDLLYYAVTQDAMLIFENLSRGFGRQGKRTFMAERQYTRMEDWLTAKLAYEGLPSKTYLSKTLAQYTSKTCSNCGFTITSADYDRVLEKLKKTATGWMTTINGKELKVEGQITYYNRYKRQNVVKDLSVELDRLSEESVNNDISSWTKGRSGEALSLLKKRFSHRPVQEKFVCLNCGFETHADEQAALNIARSWLFLRSQEYKKYQTNKTTGNTDKRAFVETWQSFYRKKLKEVWKPAV

SEQ ID NO: 127 - protein, 979 aa, synthetic construct
QEIKRINKIRRRLVKDSNTKKAGKTGPMKTLLVRVMTPDLRERLENLRKKPENIPQPISNTSRANLNKLLTDYTEMKKAILHVYWEEFQKDPVGLMSRVAQPASKKIDQNKLKPEMDEKGNLTTAGFACSQCGQPLFVYKLEQVSEKGKAYTNYFGRCNVAEHEKLILLAQLKPEKDSDEAVTYSLGKFGQRALDFYSIHVTKESTHPVKPLAQIAGNRYASGPVGKALSDACMGTIASFLSKYQDIIIEHQKVVKGNQKRLESLRELAGKENLEYPSVTLPPQPHTKEGVDAYNEVIARVRMWVNLNLWQKLKLSRDDAKPLLRLKGFPSFPLVERQANEVDWWDMVCNVKKLINEKKEDGKVFWQNLAGYKRQEALRPYLSSEEDRKKGKKFARYQLGDLLLHLEKKHGEWDWGKVYDEAWERIDKKVEGLSKHIKLEEERRSEDAQSKAALTDWLRAKASFVIEGLKEADKDEFCRCELKLQKWYGDLRGKPFAIEAENSILDISGFSKQYNCAFIWQKDGVKKLNLYLIINYFKGGKLRFKKIKPEAFEANRFYTVINKKSGEIVPMEVNFNFDDPNLIILPLAFGKRQGREFIWNDLLSLETGSLKLANGRVIEKTLYNRRTRQDEPALFVALTFERREVLDSSNIKPMNLIGVDRGENIPAVIALTDPEGCPLSRFKDSLGNPTHILRIGESYKEKQRTIQAKKEVEQRRAGGYSRKYASKAKNLADDMVRNTARDLLYYAVTQDAMLIFENLSRGFGRQGKRTFMAERQYTRMEDWLTAKLAYEGLPSKTYLSKTLAQYTSKTCSNCGFTITSADYDRVLEKLKKTATGWMTTINGKELKVEGQITYYNRYKRQNVVKDLSVELDRLSEESVNNDISSWTKGRSGEALSLLKKRFSHRPVQEKFVCLNCGFETHADEQAALNIARSWLFLRSQEYKKYQTNKTTGNTDKRAFVETWQSFYRKKLKEVWKPAV

SEQ ID NO: 128 - protein, 979 aa, synthetic construct
QEIKRINKIRRRLVKDSNTKKAGKTGPMKTLLVRVMTPDLRERLENLRKKPENIPQPISNTSRANLNKLLTDYTEMKKAILHVYWEEFQKDPVGLMSRVAQPASKKIDQNKLKPEMDEKGNLTTAGFACSQCGQPLFVYKLEQVSEKGKAYTNYFGRCNVAEHEKLILLAQLKPEKDSDEAVTYSLGKFGQRALDFYSIHVTKESTHPVKPLAQIAGNRYASGPVGKALSDACMGTIASFLSKYQDIIIEHQKVVKGNQKRLESLRELAGKENLEYPSVTLPPQPHTKEGVDAYNEVIARVRMWVNLNLWQKLKLSRDDAKPLLRLKGFPSFPLVERQANEVDWWDMVCNVKKLINEKKEDGKVFWQNLAGYKRQEALRPYLSSEEDRKKGKKFARYQLGDLLLHLEKKHGEYDWGKVYDEAWERIDKKVEGLSKHIKLEEERRSEDAQSKAALTDWLRAKASFVIEGLKEADKDEFCRCELKLQKWYGDLRGKPFAIEAENSILDISGFSKQYNCAFIWQKDGVKKLNLYLIINYFKGGKLRFKKIKPEAFEANRFYTVINKKSGEIVPMEVNFNFDDPNLIILPLAFGKRQGREFIWNDLLSLETGSLKLANGRVIEKTLYNRRTRQDEPALFVALTFERREVLDSSNIKPMNLIGVDRGENIPAVIALTDPEGCPLSRFKDSLGNPTHILRIGESYKEKQRTIQAKKEVEQRRAGGYSRKYASKAKNLADDMVRNTARDLLYYAVTQDAMLIFENLSRGFGRQGKRTFMAERQYTRMEDWLTAKLAYEGLPSKTYLSKTLAQYTSKTCSNCGFTITSADYDRVLEKLKKTATGWMTTINGKELKVEGQITYYNRYKRQNVVKDLSVELDRLSEESVNNDISSWTKGRSGEALSLLKKRFSHRPVQEKFVCLNCGFETHADEQAALNIARSWLFLRSQEYKKYQTNKTTGNTDKRAFVETWQSFYRKKLKEVWKPAV

SEQ ID NO: 129 - protein, 979 aa, synthetic construct
QEIKRINKIRRRLVKDSNTKKAGKTGPMKTLLVRVMTPDLRERLENLRKKPENIPQPISNTSRANLNKLLTDYTEMKKAILHVYWEEFQKDPVGLMSRVAQPASKKIDQNKLKPEMDEKGNLTTAGFACSQCGQPLFVYKLEQVSEKGKAYTNYFGRCNVAEHEKLILLAQLKPEKDSDEAVTYSLGKFGQRALDFYSIHVTKESTHPVKPLAQIAGNRYASGPVGKALSDACMGTIASFLSKYQDIIIEHQKVVKGNQKRLESLRELAGKENLEYPSVTLPPQPHTKEGVDAYNEVIARVRMWVNLNLWQKLKLSRDDAKPLLRLKGFPSFPLVERQANEVDWWDMVCNVKKLINEKKEDGKVFWQNLAGYKRQEALRPYLSSEEDRKKGKKFARYQLGDLLLHLEKKHGEDYWGKVYDEAWERIDKKVEGLSKHIKLEEERRSEDAQSKAALTDWLRAKASFVIEGLKEADKDEFCRCELKLQKWYGDLRGKPFAIEAENSILDISGFSKQYNCAFIWQKDGVKKLNLYLIINYFKGGKLRFKKIKPEAFEANRFYTVINKKSGEIVPMEVNFNFDDPNLIILPLAFGKRQGREFIWNDLLSLETGSLKLANGRVIEKTLYNRRTRQDEPALFVALTFERREVLDSSNIKPMNLIGVDRGENIPAVIALTDPEGCPLSRFKDSLGNPTHILRIGESYKEKQRTIQAKKEVEQRRAGGYSRKYASKAKNLADDMVRNTARDLLYYAVTQDAMLIFENLSRGFGRQGKRTFMAERQYTRMEDWLTAKLAYEGLPSKTYLSKTLAQYTSKTCSNCGFTITSADYDRVLEKLKKTATGWMTTINGKELKVEGQITYYNRYKRQNVVKDLSVELDRLSEESVNNDISSWTKGRSGEALSLLKKRFSHRPVQEKFVCLNCGFETHADEQAALNIARSWLFLRSQEYKKYQTNKTTGNTDKRAFVETWQSFYRKKLKEVWKPAV

SEQ ID NO: 130 - protein, 978 aa, synthetic construct
QEIKRINKIRRRLVKDSNTKKAGKTGPMKTLLVRVMTPDLRERLENLRKKPENIPQPISNTSRANLNKLLTDYTEMKKAILHVYWEEFQKDPVGLMSRVAQPASKKIDQNKLKPEMDEKGNLTTAGFACSQCGQPLFVYKLEQVSEKGKAYTNYFGRCNVAEHEKLILLAQLKPEKDSDEAVTYSLGKFGQRALDFYSIHVTKESTHPVKPLAQIAGNRYASGPVGKALSDACMGTIASFLSKYQDIIIEHQKVVKGNQKRLESLRELAGKENLEYPSVTLPPQPHTKEGVDAYNEVIARVRMWVNLNLWQKLKLSRDDAKPLLRLKGFPSFPLVERQANEVDWWDMVCNVKKLINEKKEDGKVFWQNLAGYKRQEALRPYLSSEEDRKKGKKFARYQLGDLLLHLEKKHGEDRGKVYDEAWERIDKKVEGLSKHIKLEEERRSEDAQSKAALTDWLRAKASFVIEGLKEADKDEFCRCELKLQKWYGDLRGKPFAIEAENSILDISGFSKQYNCAFIWQKDGVKKLNLYLIINYFKGGKLRFKKIKPEAFEANRFYTVINKKSGEIVPMEVNFNFDDPNLIILPLAFGKRQGREFIWNDLLSLETGSLKLANGRVIEKTLYNRRTRQDEPALFVALTFERREVLDSSNIKPMNLIGVDRGENIPAVIALTDPEGCPLSRFKDSLGNPTHILRIGESYKEKQRTIQAKKEVEQRRAGGYSRKYASKAKNLADDMVRNTARDLLYYAVTQDAMLIFENLSRGFGRQGKRTFMAERQYTRMEDWLTAKLAYEGLPSKTYLSKTLAQYTSKTCSNCGFTITSADYDRVLEKLKKTATGWMTTINGKELKVEGQITYYNRYKRQNVVKDLSVELDRLSEESVNNDISSWTKGRSGEALSLLKKRFSHRPVQEKFVCLNCGFETHADEQAALNIARSWLFLRSQEYKKYQTNKTTGNTDKRAFVETWQSFYRKKLKEVWKPAV

SEQ ID NO: 131 - protein, 978 aa, synthetic construct
QEIKRINKIRRRLVKDSNTKKAGKTGPMKTLLVRVMTPDLRERLENLRKKPENIPQPISNTSRANLNKLLTDYTEMKKAILHVYWEEFQKDPVGLMSRVAQPASKKIDQNKLKPEMDEKGNLTTAGFACSQCGQPLFVYKLEQVSEKGKAYTNYFGRCNVAEHEKLILLAQLKPEKDSDEAVTYSLGKFGQRALDFYSIHVTKESTHPVKPLAQIAGNRYASGPVGKALSDACMGTIASFLSKYQDIIIEHQKVVKGNQKRLESLRELAGKENLEYPSVTLPPQPHTKEGVDAYNEVIARVRMWVNLNLWQKLKLSRDDAKPLLRLKGFPSFPLVERQANEVDWWDMVCNVKKLINEKKEDGKVFWQNLAGYKRQEALRPYLSSEEDRKKGKKFARYQLGDLLLHLEKKHGEDWGDVYDEAWERIDKKVEGLSKHIKLEEERRSEDAQSKAALTDWLRAKASFVIEGLKEADKDEFCRCELKLQKWYGDLRGKPFAIEAENSILDISGFSKQYNCAFIWQKDGVKKLNLYLIINYFKGGKLRFKKIKPEAFEANRFYTVINKKSGEIVPMEVNFNFDDPNLIILPLAFGKRQGREFIWNDLLSLETGSLKLANGRVIEKTLYNRRTRQDEPALFVALTFERREVLDSSNIKPMNLIGVDRGENIPAVIALTDPEGCPLSRFKDSLGNPTHILRIGESYKEKQRTIQAKKEVEQRRAGGYSRKYASKAKNLADDMVRNTARDLLYYAVTQDAMLIFENLSRGFGRQGKRTFMAERQYTRMEDWLTAKLAYEGLPSKTYLSKTLAQYTSKTCSNCGFTITSADYDRVLEKLKKTATGWMTTINGKELKVEGQITYYNRYKRQNVVKDLSVELDRLSEESVNNDISSWTKGRSGEALSLLKKRFSHRPVQEKFVCLNCGFETHADEQAALNIARSWLFLRSQEYKKYQTNKTTGNTDKRAFVETWQSFYRKKLKEVWKPAV

SEQ ID NO: 132 - protein, 978 aa, synthetic construct
QEIKRINKIRRRLVKDSNTKKAGKTGPMKTLLVRVMTPDLRERLENLRKKPENIPQPISNTSRANLNKLLTDYTEMKKAILHVYWEEFQKDPVGLMSRVAQPASKKIDQNKLKPEMDEKGNLTTAGFACSQCGQPLFVYKLEQVSEKGKAYTNYFGRCNVAEHEKLILLAQLKPEKDSDEAVTYSLGKFGQRALDFYSIHVTKESTHPVKPLAQIAGNRYASGPVGKALSDACMGTIASFLSKYQDIIIEHQKVVKGNQKRLESLRELAGKENLEYPSVTLPPQPHTKEGVDAYNEVIARVRMWVNLNLWQKLKLSRDDAKPLLRLKGFPSFPLVERQANEVDWWDMVCNVKKLINEKKEDGKVFWQNLAGYKRQEALRPYLSSEEDRKKGKKFARYQLGDLLLHLEKKHGEDWGPVYDEAWERIDKKVEGLSKHIKLEEERRSEDAQSKAALTDWLRAKASFVIEGLKEADKDEFCRCELKLQKWYGDLRGKPFAIEAENSILDISGFSKQYNCAFIWQKDGVKKLNLYLIINYFKGGKLRFKKIKPEAFEANRFYTVINKKSGEIVPMEVNFNFDDPNLIILPLAFGKRQGREFIWNDLLSLETGSLKLANGRVIEKTLYNRRTRQDEPALFVALTFERREVLDSSNIKPMNLIGVDRGENIPAVIALTDPEGCPLSRFKDSLGNPTHILRIGESYKEKQRTIQAKKEVEQRRAGGYSRKYASKAKNLADDMVRNTARDLLYYAVTQDAMLIFENLSRGFGRQGKRTFMAERQYTRMEDWLTAKLAYEGLPSKTYLSKTLAQYTSKTCSNCGFTITSADYDRVLEKLKKTATGWMTTINGKELKVEGQITYYNRYKRQNVVKDLSVELDRLSEESVNNDISSWTKGRSGEALSLLKKRFSHRPVQEKFVCLNCGFETHADEQAALNIARSWLFLRSQEYKKYQTNKTTGNTDKRAFVETWQSFYRKKLKEVWKPAV

SEQ ID NO: 133 - protein, 978 aa, synthetic construct
QEIKRINKIRRRLVKDSNTKKAGKTGPMKTLLVRVMTPDLRERLENLRKKPENIPQPISNTSRANLNKLLTDYTEMKKAILHVYWEEFQKDPVGLMSRVAQPASKKIDQNKLKPEMDEKGNLTTAGFACSQCGQPLFVYKLEQVSEKGKAYTNYFGRCNVAEHEKLILLAQLKPEKDSDEAVTYSLGKFGQRALDFYSIHVTKESTHPVKPLAQIAGNRYASGPVGKALSDACMGTIASFLSKYQDIIIEHQKVVKGNQKRLESLRELAGKENLEYPSVTLPPQPHTKEGVDAYNEVIARVRMWVNLNLWQKLKLSRDDAKPLLRLKGFPSFPLVERQANEVDWWDMVCNVKKLINEKKEDGKVFWQNLAGYKRQEALRPYLSSEEDRKKGKKFARYQLGDLLLHLEKKHGEDWGKLYDEAWERIDKKVEGLSKHIKLEEERRSEDAQSKAALTDWLRAKASFVIEGLKEADKDEFCRCELKLQKWYGDLRGKPFAIEAENSILDISGFSKQYNCAFIWQKDGVKKLNLYLIINYFKGGKLRFKKIKPEAFEANRFYTVINKKSGEIVPMEVNFNFDDPNLIILPLAFGKRQGREFIWNDLLSLETGSLKLANGRVIEKTLYNRRTRQDEPALFVALTFERREVLDSSNIKPMNLIGVDRGENIPAVIALTDPEGCPLSRFKDSLGNPTHILRIGESYKEKQRTIQAKKEVEQRRAGGYSRKYASKAKNLADDMVRNTARDLLYYAVTQDAMLIFENLSRGFGRQGKRTFMAERQYTRMEDWLTAKLAYEGLPSKTYLSKTLAQYTSKTCSNCGFTITSADYDRVLEKLKKTATGWMTTINGKELKVEGQITYYNRYKRQNVVKDLSVELDRLSEESVNNDISSWTKGRSGEALSLLKKRFSHRPVQEKFVCLNCGFETHADEQAALNIARSWLFLRSQEYKKYQTNKTTGNTDKRAFVETWQSFYRKKLKEVWKPAV

SEQ ID NO: 134 - protein, 978 aa, synthetic construct
QEIKRINKIRRRLVKDSNTKKAGKTGPMKTLLVRVMTPDLRERLENLRKKPENIPQPISNTSRANLNKLLTDYTEMKKAILHVYWEEFQKDPVGLMSRVAQPASKKIDQNKLKPEMDEKGNLTTAGFACSQCGQPLFVYKLEQVSEKGKAYTNYFGRCNVAEHEKLILLAQLKPEKDSDEAVTYSLGKFGQRALDFYSIHVTKESTHPVKPLAQIAGNRYASGPVGKALSDACMGTIASFLSKYQDIIIEHQKVVKGNQKRLESLRELAGKENLEYPSVTLPPQPHTKEGVDAYNEVIARVRMWVNLNLWQKLKLSRDDAKPLLRLKGFPSFPLVERQANEVDWWDMVCNVKKLINEKKEDGKVFWQNLAGYKRQEALRPYLSSEEDRKKGKKFARYQLGDLLLHLEKKHGEDWGKVYGEAWERIDKKVEGLSKHIKLEEERRSEDAQSKAALTDWLRAKASFVIEGLKEADKDEFCRCELKLQKWYGDLRGKPFAIEAENSILDISGFSKQYNCAFIWQKDGVKKLNLYLIINYFKGGKLRFKKIKPEAFEANRFYTVINKKSGEIVPMEVNFNFDDPNLIILPLAFGKRQGREFIWNDLLSLETGSLKLANGRVIEKTLYNRRTRQDEPALFVALTFERREVLDSSNIKPMNLIGVDRGENIPAVIALTDPEGCPLSRFKDSLGNPTHILRIGESYKEKQRTIQAKKEVEQRRAGGYSRKYASKAKNLADDMVRNTARDLLYYAVTQDAMLIFENLSRGFGRQGKRTFMAERQYTRMEDWLTAKLAYEGLPSKTYLSKTLAQYTSKTCSNCGFTITSADYDRVLEKLKKTATGWMTTINGKELKVEGQITYYNRYKRQNVVKDLSVELDRLSEESVNNDISSWTKGRSGEALSLLKKRFSHRPVQEKFVCLNCGFETHADEQAALNIARSWLFLRSQEYKKYQTNKTTGNTDKRAFVETWQSFYRKKLKEVWKPAV

SEQ ID NO: 135 - protein, 978 aa, synthetic construct
QEIKRINKIRRRLVKDSNTKKAGKTGPMKTLLVRVMTPDLRERLENLRKKPENIPQPISNTSRANLNKLLTDYTEMKKAILHVYWEEFQKDPVGLMSRVAQPASKKIDQNKLKPEMDEKGNLTTAGFACSQCGQPLFVYKLEQVSEKGKAYTNYFGRCNVAEHEKLILLAQLKPEKDSDEAVTYSLGKFGQRALDFYSIHVTKESTHPVKPLAQIAGNRYASGPVGKALSDACMGTIASFLSKYQDIIIEHQKVVKGNQKRLESLRELAGKENLEYPSVTLPPQPHTKEGVDAYNEVIARVRMWVNLNLWQKLKLSRDDAKPLLRLKGFPSFPLVERQANEVDWWDMVCNVKKLINEKKEDGKVFWQNLAGYKRQEALRPYLSSEEDRKKGKKFARYQLGDLLLHLEKKHGEDWGKVYDEAWERIDKKVEGLSKHQKLEEERRSEDAQSKAALTDWLRAKASFVIEGLKEADKDEFCRCELKLQKWYGDLRGKPFAIEAENSILDISGFSKQYNCAFIWQKDGVKKLNLYLIINYFKGGKLRFKKIKPEAFEANRFYTVINKKSGEIVPMEVNFNFDDPNLIILPLAFGKRQGREFIWNDLLSLETGSLKLANGRVIEKTLYNRRTRQDEPALFVALTFERREVLDSSNIKPMNLIGVDRGENIPAVIALTDPEGCPLSRFKDSLGNPTHILRIGESYKEKQRTIQAKKEVEQRRAGGYSRKYASKAKNLADDMVRNTARDLLYYAVTQDAMLIFENLSRGFGRQGKRTFMAERQYTRMEDWLTAKLAYEGLPSKTYLSKTLAQYTSKTCSNCGFTITSADYDRVLEKLKKTATGWMTTINGKELKVEGQITYYNRYKRQNVVKDLSVELDRLSEESVNNDISSWTKGRSGEALSLLKKRFSHRPVQEKFVCLNCGFETHADEQAALNIARSWLFLRSQEYKKYQTNKTTGNTDKRAFVETWQSFYRKKLKEVWKPAV

SEQ ID NO: 136 - protein, 978 aa, synthetic construct
QEIKRINKIRRRLVKDSNTKKAGKTGPMKTLLVRVMTPDLRERLENLRKKPENIPQPISNTSRANLNKLLTDYTEMKKAILHVYWEEFQKDPVGLMSRVAQPASKKIDQNKLKPEMDEKGNLTTAGFACSQCGQPLFVYKLEQVSEKGKAYTNYFGRCNVAEHEKLILLAQLKPEKDSDEAVTYSLGKFGQRALDFYSIHVTKESTHPVKPLAQIAGNRYASGPVGKALSDACMGTIASFLSKYQDIIIEHQKVVKGNQKRLESLRELAGKENLEYPSVTLPPQPHTKEGVDAYNEVIARVRMWVNLNLWQKLKLSRDDAKPLLRLKGFPSFPLVERQANEVDWWDMVCNVKKLINEKKEDGKVFWQNLAGYKRQEALRPYLSSEEDRKKGKKFARYQLGDLLLHLEKKHGEDWGKVYDEAWERIDKKVEGLSKHIKLEEEDRSEDAQSKAALTDWLRAKASFVIEGLKEADKDEFCRCELKLQKWYGDLRGKPFAIEAENSILDISGFSKQYNCAFIWQKDGVKKLNLYLIINYFKGGKLRFKKIKPEAFEANRFYTVINKKSGEIVPMEVNFNFDDPNLIILPLAFGKRQGREFIWNDLLSLETGSLKLANGRVIEKTLYNRRTRQDEPALFVALTFERREVLDSSNIKPMNLIGVDRGENIPAVIALTDPEGCPLSRFKDSLGNPTHILRIGESYKEKQRTIQAKKEVEQRRAGGYSRKYASKAKNLADDMVRNTARDLLYYAVTQDAMLIFENLSRGFGRQGKRTFMAERQYTRMEDWLTAKLAYEGLPSKTYLSKTLAQYTSKTCSNCGFTITSADYDRVLEKLKKTATGWMTTINGKELKVEGQITYYNRYKRQNVVKDLSVELDRLSEESVNNDISSWTKGRSGEALSLLKKRFSHRPVQEKFVCLNCGFETHADEQAALNIARSWLFLRSQEYKKYQTNKTTGNTDKRAFVETWQSFYRKKLKEVWKPAV

SEQ ID NO: 137 - protein, 978 aa, synthetic construct
QEIKRINKIRRRLVKDSNTKKAGKTGPMKTLLVRVMTPDLRERLENLRKKPENIPQPISNTSRANLNKLLTDYTEMKKAILHVYWEEFQKDPVGLMSRVAQPASKKIDQNKLKPEMDEKGNLTTAGFACSQCGQPLFVYKLEQVSEKGKAYTNYFGRCNVAEHEKLILLAQLKPEKDSDEAVTYSLGKFGQRALDFYSIHVTKESTHPVKPLAQIAGNRYASGPVGKALSDACMGTIASFLSKYQDIIIEHQKVVKGNQKRLESLRELAGKENLEYPSVTLPPQPHTKEGVDAYNEVIARVRMWVNLNLWQKLKLSRDDAKPLLRLKGFPSFPLVERQANEVDWWDMVCNVKKLINEKKEDGKVFWQNLAGYKRQEALRPYLSSEEDRKKGKKFARYQLGDLLLHLEKKHGEDWGKVYDEAWERIDKKVEGLSKHIKLEEERRSEDAQSKAATTDWLRAKASFVIEGLKEADKDEFCRCELKLQKWYGDLRGKPFAIEAENSILDISGFSKQYNCAFIWQKDGVKKLNLYLIINYFKGGKLRFKKIKPEAFEANRFYTVINKKSGEIVPMEVNFNFDDPNLIILPLAFGKRQGREFIWNDLLSLETGSLKLANGRVIEKTLYNRRTRQDEPALFVALTFERREVLDSSNIKPMNLIGVDRGENIPAVIALTDPEGCPLSRFKDSLGNPTHILRIGESYKEKQRTIQAKKEVEQRRAGGYSRKYASKAKNLADDMVRNTARDLLYYAVTQDAMLIFENLSRGFGRQGKRTFMAERQYTRMEDWLTAKLAYEGLPSKTYLSKTLAQYTSKTCSNCGFTITSADYDRVLEKLKKTATGWMTTINGKELKVEGQITYYNRYKRQNVVKDLSVELDRLSEESVNNDISSWTKGRSGEALSLLKKRFSHRPVQEKFVCLNCGFETHADEQAALNIARSWLFLRSQEYKKYQTNKTTGNTDKRAFVETWQSFYRKKLKEVWKPAV

SEQ ID NO: 138 - protein, 978 aa, synthetic construct
QEIKRINKIRRRLVKDSNTKKAGKTGPMKTLLVRVMTPDLRERLENLRKKPENIPQPISNTSRANLNKLLTDYTEMKKAILHVYWEEFQKDPVGLMSRVAQPASKKIDQNKLKPEMDEKGNLTTAGFACSQCGQPLFVYKLEQVSEKGKAYTNYFGRCNVAEHEKLILLAQLKPEKDSDEAVTYSLGKFGQRALDFYSIHVTKESTHPVKPLAQIAGNRYASGPVGKALSDACMGTIASFLSKYQDIIIEHQKVVKGNQKRLESLRELAGKENLEYPSVTLPPQPHTKEGVDAYNEVIARVRMWVNLNLWQKLKLSRDDAKPLLRLKGFPSFPLVERQANEVDWWDMVCNVKKLINEKKEDGKVFWQNLAGYKRQEALRPYLSSEEDRKKGKKFARYQLGDLLLHLEKKHGEDWGKVYDEAWERIDKKVEGLSKHIKLEEERRSEDAQSKAALTDWLRAKTSFVIEGLKEADKDEFCRCELKLQKWYGDLRGKPFAIEAENSILDISGFSKQYNCAFIWQKDGVKKLNLYLIINYFKGGKLRFKKIKPEAFEANRFYTVINKKSGEIVPMEVNFNFDDPNLIILPLAFGKRQGREFIWNDLLSLETGSLKLANGRVIEKTLYNRRTRQDEPALFVALTFERREVLDSSNIKPMNLIGVDRGENIPAVIALTDPEGCPLSRFKDSLGNPTHILRIGESYKEKQRTIQAKKEVEQRRAGGYSRKYASKAKNLADDMVRNTARDLLYYAVTQDAMLIFENLSRGFGRQGKRTFMAERQYTRMEDWLTAKLAYEGLPSKTYLSKTLAQYTSKTCSNCGFTITSADYDRVLEKLKKTATGWMTTINGKELKVEGQITYYNRYKRQNVVKDLSVELDRLSEESVNNDISSWTKGRSGEALSLLKKRFSHRPVQEKFVCLNCGFETHADEQAALNIARSWLFLRSQEYKKYQTNKTTGNTDKRAFVETWQSFYRKKLKEVWKPAV

SEQ ID NO: 139 - protein, 978 aa, synthetic construct
QEIKRINKIRRRLVKDSNTKKAGKTGPMKTLLVRVMTPDLRERLENLRKKPENIPQPISNTSRANLNKLLTDYTEMKKAILHVYWEEFQKDPVGLMSRVAQPASKKIDQNKLKPEMDEKGNLTTAGFACSQCGQPLFVYKLEQVSEKGKAYTNYFGRCNVAEHEKLILLAQLKPEKDSDEAVTYSLGKFGQRALDFYSIHVTKESTHPVKPLAQIAGNRYASGPVGKALSDACMGTIASFLSKYQDIIIEHQKVVKGNQKRLESLRELAGKENLEYPSVTLPPQPHTKEGVDAYNEVIARVRMWVNLNLWQKLKLSRDDAKPLLRLKGFPSFPLVERQANEVDWWDMVCNVKKLINEKKEDGKVFWQNLAGYKRQEALRPYLSSEEDRKKGKKFARYQLGDLLLHLEKKHGEDWGKVYDEAWERIDKKVEGLSKHIKLEEERRSEDAQSKAALTDWLRAKKSFVIEGLKEADKDEFCRCELKLQKWYGDLRGKPFAIEAENSILDISGFSKQYNCAFIWQKDGVKKLNLYLIINYFKGGKLRFKKIKPEAFEANRFYTVINKKSGEIVPMEVNFNFDDPNLIILPLAFGKRQGREFIWNDLLSLETGSLKLANGRVIEKTLYNRRTRQDEPALFVALTFERREVLDSSNIKPMNLIGVDRGENIPAVIALTDPEGCPLSRFKDSLGNPTHILRIGESYKEKQRTIQAKKEVEQRRAGGYSRKYASKAKNLADDMVRNTARDLLYYAVTQDAMLIFENLSRGFGRQGKRTFMAERQYTRMEDWLTAKLAYEGLPSKTYLSKTLAQYTSKTCSNCGFTITSADYDRVLEKLKKTATGWMTTINGKELKVEGQITYYNRYKRQNVVKDLSVELDRLSEESVNNDISSWTKGRSGEALSLLKKRFSHRPVQEKFVCLNCGFETHADEQAALNIARSWLFLRSQEYKKYQTNKTTGNTDKRAFVETWQSFYRKKLKEVWKPAV

SEQ ID NO: 140 - protein, 978 aa, synthetic construct
QEIKRINKIRRRLVKDSNTKKAGKTGPMKTLLVRVMTPDLRERLENLRKKPENIPQPISNTSRANLNKLLTDYTEMKKAILHVYWEEFQKDPVGLMSRVAQPASKKIDQNKLKPEMDEKGNLTTAGFACSQCGQPLFVYKLEQVSEKGKAYTNYFGRCNVAEHEKLILLAQLKPEKDSDEAVTYSLGKFGQRALDFYSIHVTKESTHPVKPLAQIAGNRYASGPVGKALSDACMGTIASFLSKYQDIIIEHQKVVKGNQKRLESLRELAGKENLEYPSVTLPPQPHTKEGVDAYNEVIARVRMWVNLNLWQKLKLSRDDAKPLLRLKGFPSFPLVERQANEVDWWDMVCNVKKLINEKKEDGKVFWQNLAGYKRQEALRPYLSSEEDRKKGKKFARYQLGDLLLHLEKKHGEDWGKVYDEAWERIDKKVEGLSKHIKLEEERRSEDAQSKAALTDWLRAKASFVEEGLKEADKDEFCRCELKLQKWYGDLRGKPFAIEAENSILDISGFSKQYNCAFIWQKDGVKKLNLYLIINYFKGGKLRFKKIKPEAFEANRFYTVINKKSGEIVPMEVNFNFDDPNLIILPLAFGKRQGREFIWNDLLSLETGSLKLANGRVIEKTLYNRRTRQDEPALFVALTFERREVLDSSNIKPMNLIGVDRGENIPAVIALTDPEGCPLSRFKDSLGNPTHILRIGESYKEKQRTIQAKKEVEQRRAGGYSRKYASKAKNLADDMVRNTARDLLYYAVTQDAMLIFENLSRGFGRQGKRTFMAERQYTRMEDWLTAKLAYEGLPSKTYLSKTLAQYTSKTCSNCGFTITSADYDRVLEKLKKTATGWMTTINGKELKVEGQITYYNRYKRQNVVKDLSVELDRLSEESVNNDISSWTKGRSGEALSLLKKRFSHRPVQEKFVCLNCGFETHADEQAALNIARSWLFLRSQEYKKYQTNKTTGNTDKRAFVETWQSFYRKKLKEVWKPAV

SEQ ID NO: 141 - protein, 979 aa, synthetic construct
QEIKRINKIRRRLVKDSNTKKAGKTGPMKTLLVRVMTPDLRERLENLRKKPENIPQPISNTSRANLNKLLTDYTEMKKAILHVYWEEFQKDPVGLMSRVAQPASKKIDQNKLKPEMDEKGNLTTAGFACSQCGQPLFVYKLEQVSEKGKAYTNYFGRCNVAEHEKLILLAQLKPEKDSDEAVTYSLGKFGQRALDFYSIHVTKESTHPVKPLAQIAGNRYASGPVGKALSDACMGTIASFLSKYQDIIIEHQKVVKGNQKRLESLRELAGKENLEYPSVTLPPQPHTKEGVDAYNEVIARVRMWVNLNLWQKLKLSRDDAKPLLRLKGFPSFPLVERQANEVDWWDMVCNVKKLINEKKEDGKVFWQNLAGYKRQEALRPYLSSEEDRKKGKKFARYQLGDLLLHLEKKHGEDWGKVYDEAWERIDKKVEGLSKHIKLEEERRSEDAQSKAALTDWLRAKASFVISEGLKEADKDEFCRCELKLQKWYGDLRGKPFAIEAENSILDISGFSKQYNCAFIWQKDGVKKLNLYLIINYFKGGKLRFKKIKPEAFEANRFYTVINKKSGEIVPMEVNFNFDDPNLIILPLAFGKRQGREFIWNDLLSLETGSLKLANGRVIEKTLYNRRTRQDEPALFVALTFERREVLDSSNIKPMNLIGVDRGENIPAVIALTDPEGCPLSRFKDSLGNPTHILRIGESYKEKQRTIQAKKEVEQRRAGGYSRKYASKAKNLADDMVRNTARDLLYYAVTQDAMLIFENLSRGFGRQGKRTFMAERQYTRMEDWLTAKLAYEGLPSKTYLSKTLAQYTSKTCSNCGFTITSADYDRVLEKLKKTATGWMTTINGKELKVEGQITYYNRYKRQNVVKDLSVELDRLSEESVNNDISSWTKGRSGEALSLLKKRFSHRPVQEKFVCLNCGFETHADEQAALNIARSWLFLRSQEYKKYQTNKTTGNTDKRAFVETWQSFYRKKLKEVWKPAV

SEQ ID NO: 142 - protein, 979 aa, synthetic construct
QEIKRINKIRRRLVKDSNTKKAGKTGPMKTLLVRVMTPDLRERLENLRKKPENIPQPISNTSRANLNKLLTDYTEMKKAILHVYWEEFQKDPVGLMSRVAQPASKKIDQNKLKPEMDEKGNLTTAGFACSQCGQPLFVYKLEQVSEKGKAYTNYFGRCNVAEHEKLILLAQLKPEKDSDEAVTYSLGKFGQRALDFYSIHVTKESTHPVKPLAQIAGNRYASGPVGKALSDACMGTIASFLSKYQDIIIEHQKVVKGNQKRLESLRELAGKENLEYPSVTLPPQPHTKEGVDAYNEVIARVRMWVNLNLWQKLKLSRDDAKPLLRLKGFPSFPLVERQANEVDWWDMVCNVKKLINEKKEDGKVFWQNLAGYKRQEALRPYLSSEEDRKKGKKFARYQLGDLLLHLEKKHGEDWGKVYDEAWERIDKKVEGLSKHIKLEEERRSEDAQSKAALTDWLRAKASFVIERGLKEADKDEFCRCELKLQKWYGDLRGKPFAIEAENSILDISGFSKQYNCAFIWQKDGVKKLNLYLIINYFKGGKLRFKKIKPEAFEANRFYTVINKKSGEIVPMEVNFNFDDPNLIILPLAFGKRQGREFIWNDLLSLETGSLKLANGRVIEKTLYNRRTRQDEPALFVALTFERREVLDSSNIKPMNLIGVDRGENIPAVIALTDPEGCPLSRFKDSLGNPTHILRIGESYKEKQRTIQAKKEVEQRRAGGYSRKYASKAKNLADDMVRNTARDLLYYAVTQDAMLIFENLSRGFGRQGKRTFMAERQYTRMEDWLTAKLAYEGLPSKTYLSKTLAQYTSKTCSNCGFTITSADYDRVLEKLKKTATGWMTTINGKELKVEGQITYYNRYKRQNVVKDLSVELDRLSEESVNNDISSWTKGRSGEALSLLKKRFSHRPVQEKFVCLNCGFETHADEQAALNIARSWLFLRSQEYKKYQTNKTTGNTDKRAFVETWQSFYRKKLKEVWKPAV

SEQ ID NO: 143 - protein, 978 aa, synthetic construct
QEIKRINKIRRRLVKDSNTKKAGKTGPMKTLLVRVMTPDLRERLENLRKKPENIPQPISNTSRANLNKLLTDYTEMKKAILHVYWEEFQKDPVGLMSRVAQPASKKIDQNKLKPEMDEKGNLTTAGFACSQCGQPLFVYKLEQVSEKGKAYTNYFGRCNVAEHEKLILLAQLKPEKDSDEAVTYSLGKFGQRALDFYSIHVTKESTHPVKPLAQIAGNRYASGPVGKALSDACMGTIASFLSKYQDIIIEHQKVVKGNQKRLESLRELAGKENLEYPSVTLPPQPHTKEGVDAYNEVIARVRMWVNLNLWQKLKLSRDDAKPLLRLKGFPSFPLVERQANEVDWWDMVCNVKKLINEKKEDGKVFWQNLAGYKRQEALRPYLSSEEDRKKGKKFARYQLGDLLLHLEKKHGEDWGKVYDEAWERIDKKVEGLSKHIKLEEERRSEDAQSKAALTDWLRAKASFVIEGKKEADKDEFCRCELKLQKWYGDLRGKPFAIEAENSILDISGFSKQYNCAFIWQKDGVKKLNLYLIINYFKGGKLRFKKIKPEAFEANRFYTVINKKSGEIVPMEVNFNFDDPNLIILPLAFGKRQGREFIWNDLLSLETGSLKLANGRVIEKTLYNRRTRQDEPALFVALTFERREVLDSSNIKPMNLIGVDRGENIPAVIALTDPEGCPLSRFKDSLGNPTHILRIGESYKEKQRTIQAKKEVEQRRAGGYSRKYASKAKNLADDMVRNTARDLLYYAVTQDAMLIFENLSRGFGRQGKRTFMAERQYTRMEDWLTAKLAYEGLPSKTYLSKTLAQYTSKTCSNCGFTITSADYDRVLEKLKKTATGWMTTINGKELKVEGQITYYNRYKRQNVVKDLSVELDRLSEESVNNDISSWTKGRSGEALSLLKKRFSHRPVQEKFVCLNCGFETHADEQAALNIARSWLFLRSQEYKKYQTNKTTGNTDKRAFVETWQSFYRKKLKEVWKPAV

SEQ ID NO: 144 - protein, 978 aa, synthetic construct
QEIKRINKIRRRLVKDSNTKKAGKTGPMKTLLVRVMTPDLRERLENLRKKPENIPQPISNTSRANLNKLLTDYTEMKKAILHVYWEEFQKDPVGLMSRVAQPASKKIDQNKLKPEMDEKGNLTTAGFACSQCGQPLFVYKLEQVSEKGKAYTNYFGRCNVAEHEKLILLAQLKPEKDSDEAVTYSLGKFGQRALDFYSIHVTKESTHPVKPLAQIAGNRYASGPVGKALSDACMGTIASFLSKYQDIIIEHQKVVKGNQKRLESLRELAGKENLEYPSVTLPPQPHTKEGVDAYNEVIARVRMWVNLNLWQKLKLSRDDAKPLLRLKGFPSFPLVERQANEVDWWDMVCNVKKLINEKKEDGKVFWQNLAGYKRQEALRPYLSSEEDRKKGKKFARYQLGDLLLHLEKKHGEDWGKVYDEAWERIDKKVEGLSKHIKLEEERRSEDAQSKAALTDWLRAKASFVIEGSKEADKDEFCRCELKLQKWYGDLRGKPFAIEAENSILDISGFSKQYNCAFIWQKDGVKKLNLYLIINYFKGGKLRFKKIKPEAFEANRFYTVINKKSGEIVPMEVNFNFDDPNLIILPLAFGKRQGREFIWNDLLSLETGSLKLANGRVIEKTLYNRRTRQDEPALFVALTFERREVLDSSNIKPMNLIGVDRGENIPAVIALTDPEGCPLSRFKDSLGNPTHILRIGESYKEKQRTIQAKKEVEQRRAGGYSRKYASKAKNLADDMVRNTARDLLYYAVTQDAMLIFENLSRGFGRQGKRTFMAERQYTRMEDWLTAKLAYEGLPSKTYLSKTLAQYTSKTCSNCGFTITSADYDRVLEKLKKTATGWMTTINGKELKVEGQITYYNRYKRQNVVKDLSVELDRLSEESVNNDISSWTKGRSGEALSLLKKRFSHRPVQEKFVCLNCGFETHADEQAALNIARSWLFLRSQEYKKYQTNKTTGNTDKRAFVETWQSFYRKKLKEVWKPAV

SEQ ID NO: 145 - protein, 979 aa, synthetic construct
QEIKRINKIRRRLVKDSNTKKAGKTGPMKTLLVRVMTPDLRERLENLRKKPENIPQPISNTSRANLNKLLTDYTEMKKAILHVYWEEFQKDPVGLMSRVAQPASKKIDQNKLKPEMDEKGNLTTAGFACSQCGQPLFVYKLEQVSEKGKAYTNYFGRCNVAEHEKLILLAQLKPEKDSDEAVTYSLGKFGQRALDFYSIHVTKESTHPVKPLAQIAGNRYASGPVGKALSDACMGTIASFLSKYQDIIIEHQKVVKGNQKRLESLRELAGKENLEYPSVTLPPQPHTKEGVDAYNEVIARVRMWVNLNLWQKLKLSRDDAKPLLRLKGFPSFPLVERQANEVDWWDMVCNVKKLINEKKEDGKVFWQNLAGYKRQEALRPYLSSEEDRKKGKKFARYQLGDLLLHLEKKHGEDWGKVYDEAWERIDKKVEGLSKHIKLEEERRSEDAQSKAALTDWLRAKASFVIEGLKEADDKDEFCRCELKLQKWYGDLRGKPFAIEAENSILDISGFSKQYNCAFIWQKDGVKKLNLYLIINYFKGGKLRFKKIKPEAFEANRFYTVINKKSGEIVPMEVNFNFDDPNLIILPLAFGKRQGREFIWNDLLSLETGSLKLANGRVIEKTLYNRRTRQDEPALFVALTFERREVLDSSNIKPMNLIGVDRGENIPAVIALTDPEGCPLSRFKDSLGNPTHILRIGESYKEKQRTIQAKKEVEQRRAGGYSRKYASKAKNLADDMVRNTARDLLYYAVTQDAMLIFENLSRGFGRQGKRTFMAERQYTRMEDWLTAKLAYEGLPSKTYLSKTLAQYTSKTCSNCGFTITSADYDRVLEKLKKTATGWMTTINGKELKVEGQITYYNRYKRQNVVKDLSVELDRLSEESVNNDISSWTKGRSGEALSLLKKRFSHRPVQEKFVCLNCGFETHADEQAALNIARSWLFLRSQEYKKYQTNKTTGNTDKRAFVETWQSFYRKKLKEVWKPAV

SEQ ID NO: 146 - protein, 979 aa, synthetic construct
QEIKRINKIRRRLVKDSNTKKAGKTGPMKTLLVRVMTPDLRERLENLRKKPENIPQPISNTSRANLNKLLTDYTEMKKAILHVYWEEFQKDPVGLMSRVAQPASKKIDQNKLKPEMDEKGNLTTAGFACSQCGQPLFVYKLEQVSEKGKAYTNYFGRCNVAEHEKLILLAQLKPEKDSDEAVTYSLGKFGQRALDFYSIHVTKESTHPVKPLAQIAGNRYASGPVGKALSDACMGTIASFLSKYQDIIIEHQKVVKGNQKRLESLRELAGKENLEYPSVTLPPQPHTKEGVDAYNEVIARVRMWVNLNLWQKLKLSRDDAKPLLRLKGFPSFPLVERQANEVDWWDMVCNVKKLINEKKEDGKVFWQNLAGYKRQEALRPYLSSEEDRKKGKKFARYQLGDLLLHLEKKHGEDWGKVYDEAWERIDKKVEGLSKHIKLEEERRSEDAQSKAALTDWLRAKASFVIEGLKEADKDQEFCRCELKLQKWYGDLRGKPFAIEAENSILDISGFSKQYNCAFIWQKDGVKKLNLYLIINYFKGGKLRFKKIKPEAFEANRFYTVINKKSGEIVPMEVNFNFDDPNLIILPLAFGKRQGREFIWNDLLSLETGSLKLANGRVIEKTLYNRRTRQDEPALFVALTFERREVLDSSNIKPMNLIGVDRGENIPAVIALTDPEGCPLSRFKDSLGNPTHILRIGESYKEKQRTIQAKKEVEQRRAGGYSRKYASKAKNLADDMVRNTARDLLYYAVTQDAMLIFENLSRGFGRQGKRTFMAERQYTRMEDWLTAKLAYEGLPSKTYLSKTLAQYTSKTCSNCGFTITSADYDRVLEKLKKTATGWMTTINGKELKVEGQITYYNRYKRQNVVKDLSVELDRLSEESVNNDISSWTKGRSGEALSLLKKRFSHRPVQEKFVCLNCGFETHADEQAALNIARSWLFLRSQEYKKYQTNKTTGNTDKRAFVETWQSFYRKKLKEVWKPAV

SEQ ID NO: 147 - protein, 978 aa, synthetic construct
QEIKRINKIRRRLVKDSNTKKAGKTGPMKTLLVRVMTPDLRERLENLRKKPENIPQPISNTSRANLNKLLTDYTEMKKAILHVYWEEFQKDPVGLMSRVAQPASKKIDQNKLKPEMDEKGNLTTAGFACSQCGQPLFVYKLEQVSEKGKAYTNYFGRCNVAEHEKLILLAQLKPEKDSDEAVTYSLGKFGQRALDFYSIHVTKESTHPVKPLAQIAGNRYASGPVGKALSDACMGTIASFLSKYQDIIIEHQKVVKGNQKRLESLRELAGKENLEYPSVTLPPQPHTKEGVDAYNEVIARVRMWVNLNLWQKLKLSRDDAKPLLRLKGFPSFPLVERQANEVDWWDMVCNVKKLINEKKEDGKVFWQNLAGYKRQEALRPYLSSEEDRKKGKKFARYQLGDLLLHLEKKHGEDWGKVYDEAWERIDKKVEGLSKHIKLEEERRSEDAQSKAALTDWLRAKASFVIEGLKEADKDEKCRCELKLQKWYGDLRGKPFAIEAENSILDISGFSKQYNCAFIWQKDGVKKLNLYLIINYFKGGKLRFKKIKPEAFEANRFYTVINKKSGEIVPMEVNFNFDDPNLIILPLAFGKRQGREFIWNDLLSLETGSLKLANGRVIEKTLYNRRTRQDEPALFVALTFERREVLDSSNIKPMNLIGVDRGENIPAVIALTDPEGCPLSRFKDSLGNPTHILRIGESYKEKQRTIQAKKEVEQRRAGGYSRKYASKAKNLADDMVRNTARDLLYYAVTQDAMLIFENLSRGFGRQGKRTFMAERQYTRMEDWLTAKLAYEGLPSKTYLSKTLAQYTSKTCSNCGFTITSADYDRVLEKLKKTATGWMTTINGKELKVEGQITYYNRYKRQNVVKDLSVELDRLSEESVNNDISSWTKGRSGEALSLLKKRFSHRPVQEKFVCLNCGFETHADEQAALNIARSWLFLRSQEYKKYQTNKTTGNTDKRAFVETWQSFYRKKLKEVWKPAV

SEQ ID NO: 148 - protein, 978 aa, synthetic construct
QEIKRINKIRRRLVKDSNTKKAGKTGPMKTLLVRVMTPDLRERLENLRKKPENIPQPISNTSRANLNKLLTDYTEMKKAILHVYWEEFQKDPVGLMSRVAQPASKKIDQNKLKPEMDEKGNLTTAGFACSQCGQPLFVYKLEQVSEKGKAYTNYFGRCNVAEHEKLILLAQLKPEKDSDEAVTYSLGKFGQRALDFYSIHVTKESTHPVKPLAQIAGNRYASGPVGKALSDACMGTIASFLSKYQDIIIEHQKVVKGNQKRLESLRELAGKENLEYPSVTLPPQPHTKEGVDAYNEVIARVRMWVNLNLWQKLKLSRDDAKPLLRLKGFPSFPLVERQANEVDWWDMVCNVKKLINEKKEDGKVFWQNLAGYKRQEALRPYLSSEEDRKKGKKFARYQLGDLLLHLEKKHGEDWGKVYDEAWERIDKKVEGLSKHIKLEEERRSEDAQSKAALTDWLRAKASFVIEGLKEADKDEFCRDELKLQKWYGDLRGKPFAIEAENSILDISGFSKQYNCAFIWQKDGVKKLNLYLIINYFKGGKLRFKKIKPEAFEANRFYTVINKKSGEIVPMEVNFNFDDPNLIILPLAFGKRQGREFIWNDLLSLETGSLKLANGRVIEKTLYNRRTRQDEPALFVALTFERREVLDSSNIKPMNLIGVDRGENIPAVIALTDPEGCPLSRFKDSLGNPTHILRIGESYKEKQRTIQAKKEVEQRRAGGYSRKYASKAKNLADDMVRNTARDLLYYAVTQDAMLIFENLSRGFGRQGKRTFMAERQYTRMEDWLTAKLAYEGLPSKTYLSKTLAQYTSKTCSNCGFTITSADYDRVLEKLKKTATGWMTTINGKELKVEGQITYYNRYKRQNVVKDLSVELDRLSEESVNNDISSWTKGRSGEALSLLKKRFSHRPVQEKFVCLNCGFETHADEQAALNIARSWLFLRSQEYKKYQTNKTTGNTDKRAFVETWQSFYRKKLKEVWKPAV

SEQ ID NO: 149 - protein, 979 aa, synthetic construct
QEIKRINKIRRRLVKDSNTKKAGKTGPMKTLLVRVMTPDLRERLENLRKKPENIPQPISNTSRANLNKLLTDYTEMKKAILHVYWEEFQKDPVGLMSRVAQPASKKIDQNKLKPEMDEKGNLTTAGFACSQCGQPLFVYKLEQVSEKGKAYTNYFGRCNVAEHEKLILLAQLKPEKDSDEAVTYSLGKFGQRALDFYSIHVTKESTHPVKPLAQIAGNRYASGPVGKALSDACMGTIASFLSKYQDIIIEHQKVVKGNQKRLESLRELAGKENLEYPSVTLPPQPHTKEGVDAYNEVIARVRMWVNLNLWQKLKLSRDDAKPLLRLKGFPSFPLVERQANEVDWWDMVCNVKKLINEKKEDGKVFWQNLAGYKRQEALRPYLSSEEDRKKGKKFARYQLGDLLLHLEKKHGEDWGKVYDEAWERIDKKVEGLSKHIKLEEERRSEDAQSKAALTDWLRAKASFVIEGLKEADKDEFCRCVELKLQKWYGDLRGKPFAIEAENSILDISGFSKQYNCAFIWQKDGVKKLNLYLIINYFKGGKLRFKKIKPEAFEANRFYTVINKKSGEIVPMEVNFNFDDPNLIILPLAFGKRQGREFIWNDLLSLETGSLKLANGRVIEKTLYNRRTRQDEPALFVALTFERREVLDSSNIKPMNLIGVDRGENIPAVIALTDPEGCPLSRFKDSLGNPTHILRIGESYKEKQRTIQAKKEVEQRRAGGYSRKYASKAKNLADDMVRNTARDLLYYAVTQDAMLIFENLSRGFGRQGKRTFMAERQYTRMEDWLTAKLAYEGLPSKTYLSKTLAQYTSKTCSNCGFTITSADYDRVLEKLKKTATGWMTTINGKELKVEGQITYYNRYKRQNVVKDLSVELDRLSEESVNNDISSWTKGRSGEALSLLKKRFSHRPVQEKFVCLNCGFETHADEQAALNIARSWLFLRSQEYKKYQTNKTTGNTDKRAFVETWQSFYRKKLKEVWKPAV

SEQ ID NO: 150 - protein, 978 aa, synthetic construct
QEIKRINKIRRRLVKDSNTKKAGKTGPMKTLLVRVMTPDLRERLENLRKKPENIPQPISNTSRANLNKLLTDYTEMKKAILHVYWEEFQKDPVGLMSRVAQPASKKIDQNKLKPEMDEKGNLTTAGFACSQCGQPLFVYKLEQVSEKGKAYTNYFGRCNVAEHEKLILLAQLKPEKDSDEAVTYSLGKFGQRALDFYSIHVTKESTHPVKPLAQIAGNRYASGPVGKALSDACMGTIASFLSKYQDIIIEHQKVVKGNQKRLESLRELAGKENLEYPSVTLPPQPHTKEGVDAYNEVIARVRMWVNLNLWQKLKLSRDDAKPLLRLKGFPSFPLVERQANEVDWWDMVCNVKKLINEKKEDGKVFWQNLAGYKRQEALRPYLSSEEDRKKGKKFARYQLGDLLLHLEKKHGEDWGKVYDEAWERIDKKVEGLSKHIKLEEERRSEDAQSKAALTDWLRAKASFVIEGLKEADKDEFCRCDLKLQKWYGDLRGKPFAIEAENSILDISGFSKQYNCAFIWQKDGVKKLNLYLIINYFKGGKLRFKKIKPEAFEANRFYTVINKKSGEIVPMEVNFNFDDPNLIILPLAFGKRQGREFIWNDLLSLETGSLKLANGRVIEKTLYNRRTRQDEPALFVALTFERREVLDSSNIKPMNLIGVDRGENIPAVIALTDPEGCPLSRFKDSLGNPTHILRIGESYKEKQRTIQAKKEVEQRRAGGYSRKYASKAKNLADDMVRNTARDLLYYAVTQDAMLIFENLSRGFGRQGKRTFMAERQYTRMEDWLTAKLAYEGLPSKTYLSKTLAQYTSKTCSNCGFTITSADYDRVLEKLKKTATGWMTTINGKELKVEGQITYYNRYKRQNVVKDLSVELDRLSEESVNNDISSWTKGRSGEALSLLKKRFSHRPVQEKFVCLNCGFETHADEQAALNIARSWLFLRSQEYKKYQTNKTTGNTDKRAFVETWQSFYRKKLKEVWKPAV

SEQ ID NO: 151 - protein, 978 aa, synthetic construct
QEIKRINKIRRRLVKDSNTKKAGKTGPMKTLLVRVMTPDLRERLENLRKKPENIPQPISNTSRANLNKLLTDYTEMKKAILHVYWEEFQKDPVGLMSRVAQPASKKIDQNKLKPEMDEKGNLTTAGFACSQCGQPLFVYKLEQVSEKGKAYTNYFGRCNVAEHEKLILLAQLKPEKDSDEAVTYSLGKFGQRALDFYSIHVTKESTHPVKPLAQIAGNRYASGPVGKALSDACMGTIASFLSKYQDIIIEHQKVVKGNQKRLESLRELAGKENLEYPSVTLPPQPHTKEGVDAYNEVIARVRMWVNLNLWQKLKLSRDDAKPLLRLKGFPSFPLVERQANEVDWWDMVCNVKKLINEKKEDGKVFWQNLAGYKRQEALRPYLSSEEDRKKGKKFARYQLGDLLLHLEKKHGEDWGKVYDEAWERIDKKVEGLSKHIKLEEERRSEDAQSKAALTDWLRAKASFVIEGLKEADKDEFCRCERKLQKWYGDLRGKPFAIEAENSILDISGFSKQYNCAFIWQKDGVKKLNLYLIINYFKGGKLRFKKIKPEAFEANRFYTVINKKSGEIVPMEVNFNFDDPNLIILPLAFGKRQGREFIWNDLLSLETGSLKLANGRVIEKTLYNRRTRQDEPALFVALTFERREVLDSSNIKPMNLIGVDRGENIPAVIALTDPEGCPLSRFKDSLGNPTHILRIGESYKEKQRTIQAKKEVEQRRAGGYSRKYASKAKNLADDMVRNTARDLLYYAVTQDAMLIFENLSRGFGRQGKRTFMAERQYTRMEDWLTAKLAYEGLPSKTYLSKTLAQYTSKTCSNCGFTITSADYDRVLEKLKKTATGWMTTINGKELKVEGQITYYNRYKRQNVVKDLSVELDRLSEESVNNDISSWTKGRSGEALSLLKKRFSHRPVQEKFVCLNCGFETHADEQAALNIARSWLFLRSQEYKKYQTNKTTGNTDKRAFVETWQSFYRKKLKEVWKPAV

SEQ ID NO: 152 - protein, 978 aa, synthetic construct
QEIKRINKIRRRLVKDSNTKKAGKTGPMKTLLVRVMTPDLRERLENLRKKPENIPQPISNTSRANLNKLLTDYTEMKKAILHVYWEEFQKDPVGLMSRVAQPASKKIDQNKLKPEMDEKGNLTTAGFACSQCGQPLFVYKLEQVSEKGKAYTNYFGRCNVAEHEKLILLAQLKPEKDSDEAVTYSLGKFGQRALDFYSIHVTKESTHPVKPLAQIAGNRYASGPVGKALSDACMGTIASFLSKYQDIIIEHQKVVKGNQKRLESLRELAGKENLEYPSVTLPPQPHTKEGVDAYNEVIARVRMWVNLNLWQKLKLSRDDAKPLLRLKGFPSFPLVERQANEVDWWDMVCNVKKLINEKKEDGKVFWQNLAGYKRQEALRPYLSSEEDRKKGKKFARYQLGDLLLHLEKKHGEDWGKVYDEAWERIDKKVEGLSKHIKLEEERRSEDAQSKAALTDWLRAKASFVIEGLKEADKDEFCRCELKHQKWYGDLRGKPFAIEAENSILDISGFSKQYNCAFIWQKDGVKKLNLYLIINYFKGGKLRFKKIKPEAFEANRFYTVINKKSGEIVPMEVNFNFDDPNLIILPLAFGKRQGREFIWNDLLSLETGSLKLANGRVIEKTLYNRRTRQDEPALFVALTFERREVLDSSNIKPMNLIGVDRGENIPAVIALTDPEGCPLSRFKDSLGNPTHILRIGESYKEKQRTIQAKKEVEQRRAGGYSRKYASKAKNLADDMVRNTARDLLYYAVTQDAMLIFENLSRGFGRQGKRTFMAERQYTRMEDWLTAKLAYEGLPSKTYLSKTLAQYTSKTCSNCGFTITSADYDRVLEKLKKTATGWMTTINGKELKVEGQITYYNRYKRQNVVKDLSVELDRLSEESVNNDISSWTKGRSGEALSLLKKRFSHRPVQEKFVCLNCGFETHADEQAALNIARSWLFLRSQEYKKYQTNKTTGNTDKRAFVETWQSFYRKKLKEVWKPAV

SEQ ID NO: 153 - protein, 978 aa, synthetic construct
QEIKRINKIRRRLVKDSNTKKAGKTGPMKTLLVRVMTPDLRERLENLRKKPENIPQPISNTSRANLNKLLTDYTEMKKAILHVYWEEFQKDPVGLMSRVAQPASKKIDQNKLKPEMDEKGNLTTAGFACSQCGQPLFVYKLEQVSEKGKAYTNYFGRCNVAEHEKLILLAQLKPEKDSDEAVTYSLGKFGQRALDFYSIHVTKESTHPVKPLAQIAGNRYASGPVGKALSDACMGTIASFLSKYQDIIIEHQKVVKGNQKRLESLRELAGKENLEYPSVTLPPQPHTKEGVDAYNEVIARVRMWVNLNLWQKLKLSRDDAKPLLRLKGFPSFPLVERQANEVDWWDMVCNVKKLINEKKEDGKVFWQNLAGYKRQEALRPYLSSEEDRKKGKKFARYQLGDLLLHLEKKHGEDWGKVYDEAWERIDKKVEGLSKHIKLEEERRSEDAQSKAALTDWLRAKASFVIEGLKEADKDEFCRCELKLQPWYGDLRGKPFAIEAENSILDISGFSKQYNCAFIWQKDGVKKLNLYLIINYFKGGKLRFKKIKPEAFEANRFYTVINKKSGEIVPMEVNFNFDDPNLIILPLAFGKRQGREFIWNDLLSLETGSLKLANGRVIEKTLYNRRTRQDEPALFVALTFERREVLDSSNIKPMNLIGVDRGENIPAVIALTDPEGCPLSRFKDSLGNPTHILRIGESYKEKQRTIQAKKEVEQRRAGGYSRKYASKAKNLADDMVRNTARDLLYYAVTQDAMLIFENLSRGFGRQGKRTFMAERQYTRMEDWLTAKLAYEGLPSKTYLSKTLAQYTSKTCSNCGFTITSADYDRVLEKLKKTATGWMTTINGKELKVEGQITYYNRYKRQNVVKDLSVELDRLSEESVNNDISSWTKGRSGEALSLLKKRFSHRPVQEKFVCLNCGFETHADEQAALNIARSWLFLRSQEYKKYQTNKTTGNTDKRAFVETWQSFYRKKLKEVWKPAV

SEQ ID NO: 154 - protein, 978 aa, synthetic construct
QEIKRINKIRRRLVKDSNTKKAGKTGPMKTLLVRVMTPDLRERLENLRKKPENIPQPISNTSRANLNKLLTDYTEMKKAILHVYWEEFQKDPVGLMSRVAQPASKKIDQNKLKPEMDEKGNLTTAGFACSQCGQPLFVYKLEQVSEKGKAYTNYFGRCNVAEHEKLILLAQLKPEKDSDEAVTYSLGKFGQRALDFYSIHVTKESTHPVKPLAQIAGNRYASGPVGKALSDACMGTIASFLSKYQDIIIEHQKVVKGNQKRLESLRELAGKENLEYPSVTLPPQPHTKEGVDAYNEVIARVRMWVNLNLWQKLKLSRDDAKPLLRLKGFPSFPLVERQANEVDWWDMVCNVKKLINEKKEDGKVFWQNLAGYKRQEALRPYLSSEEDRKKGKKFARYQLGDLLLHLEKKHGEDWGKVYDEAWERIDKKVEGLSKHIKLEEERRSEDAQSKAALTDWLRAKASFVIEGLKEADKDEFCRCELKLQKWYGDLRGKPFAIEAENSILDISGFSKQYNCAFIWQKDGVKKLNLYLIINYFKGGKLRFKKIKPEAFEANRFYTVINKKSGEIVPMEVNFNFDDPNLIILPLAFGKRFGREFIWNDLLSLETGSLKLANGRVIEKTLYNRRTRQDEPALFVALTFERREVLDSSNIKPMNLIGVDRGENIPAVIALTDPEGCPLSRFKDSLGNPTHILRIGESYKEKQRTIQAKKEVEQRRAGGYSRKYASKAKNLADDMVRNTARDLLYYAVTQDAMLIFENLSRGFGRQGKRTFMAERQYTRMEDWLTAKLAYEGLPSKTYLSKTLAQYTSKTCSNCGFTITSADYDRVLEKLKKTATGWMTTINGKELKVEGQITYYNRYKRQNVVKDLSVELDRLSEESVNNDISSWTKGRSGEALSLLKKRFSHRPVQEKFVCLNCGFETHADEQAALNIARSWLFLRSQEYKKYQTNKTTGNTDKRAFVETWQSFYRKKLKEVWKPAV

SEQ ID NO: 155 - protein, 978 aa, synthetic construct
QEIKRINKIRRRLVKDSNTKKAGKTGPMKTLLVRVMTPDLRERLENLRKKPENIPQPISNTSRANLNKLLTDYTEMKKAILHVYWEEFQKDPVGLMSRVAQPASKKIDQNKLKPEMDEKGNLTTAGFACSQCGQPLFVYKLEQVSEKGKAYTNYFGRCNVAEHEKLILLAQLKPEKDSDEAVTYSLGKFGQRALDFYSIHVTKESTHPVKPLAQIAGNRYASGPVGKALSDACMGTIASFLSKYQDIIIEHQKVVKGNQKRLESLRELAGKENLEYPSVTLPPQPHTKEGVDAYNEVIARVRMWVNLNLWQKLKLSRDDAKPLLRLKGFPSFPLVERQANEVDWWDMVCNVKKLINEKKEDGKVFWQNLAGYKRQEALRPYLSSEEDRKKGKKFARYQLGDLLLHLEKKHGEDWGKVYDEAWERIDKKVEGLSKHIKLEEERRSEDAQSKAALTDWLRAKASFVIEGLKEADKDEFCRCELKLQKWYGDLRGKPFAIEAENSILDISGFSKQYNCAFIWQKDGVKKLNLYLIINYFKGGKLRFKKIKPEAFEANRFYTVINKKSGEIVPMEVNFNFDDPNLIILPLAFGKRVGREFIWNDLLSLETGSLKLANGRVIEKTLYNRRTRQDEPALFVALTFERREVLDSSNIKPMNLIGVDRGENIPAVIALTDPEGCPLSRFKDSLGNPTHILRIGESYKEKQRTIQAKKEVEQRRAGGYSRKYASKAKNLADDMVRNTARDLLYYAVTQDAMLIFENLSRGFGRQGKRTFMAERQYTRMEDWLTAKLAYEGLPSKTYLSKTLAQYTSKTCSNCGFTITSADYDRVLEKLKKTATGWMTTINGKELKVEGQITYYNRYKRQNVVKDLSVELDRLSEESVNNDISSWTKGRSGEALSLLKKRFSHRPVQEKFVCLNCGFETHADEQAALNIARSWLFLRSQEYKKYQTNKTTGNTDKRAFVETWQSFYRKKLKEVWKPAV

SEQ ID NO: 156 - protein, 979 aa, synthetic construct
QEIKRINKIRRRLVKDSNTKKAGKTGPMKTLLVRVMTPDLRERLENLRKKPENIPQPISNTSRANLNKLLTDYTEMKKAILHVYWEEFQKDPVGLMSRVAQPASKKIDQNKLKPEMDEKGNLTTAGFACSQCGQPLFVYKLEQVSEKGKAYTNYFGRCNVAEHEKLILLAQLKPEKDSDEAVTYSLGKFGQRALDFYSIHVTKESTHPVKPLAQIAGNRYASGPVGKALSDACMGTIASFLSKYQDIIIEHQKVVKGNQKRLESLRELAGKENLEYPSVTLPPQPHTKEGVDAYNEVIARVRMWVNLNLWQKLKLSRDDAKPLLRLKGFPSFPLVERQANEVDWWDMVCNVKKLINEKKEDGKVFWQNLAGYKRQEALRPYLSSEEDRKKGKKFARYQLGDLLLHLEKKHGEDWGKVYDEAWERIDKKVEGLSKHIKLEEERRSEDAQSKAALTDWLRAKASFVIEGLKEADKDEFCRCELKLQKWYGDLRGKPFAIEAENSILDISGFSKQYNCAFIWQKDGVKKLNLYLIINYFKGGKLRFKKIKPEAFEANRFYTVINKKSGEIVPMEVNFNFDDPNLIILPLAFGKRQGREFIWNDLLSLETGSLKLANGRVIEKTLYNRRTRQDEPALFVALTFERREVLDSSNIIKPMNLIGVDRGENIPAVIALTDPEGCPLSRFKDSLGNPTHILRIGESYKEKQRTIQAKKEVEQRRAGGYSRKYASKAKNLADDMVRNTARDLLYYAVTQDAMLIFENLSRGFGRQGKRTFMAERQYTRMEDWLTAKLAYEGLPSKTYLSKTLAQYTSKTCSNCGFTITSADYDRVLEKLKKTATGWMTTINGKELKVEGQITYYNRYKRQNVVKDLSVELDRLSEESVNNDISSWTKGRSGEALSLLKKRFSHRPVQEKFVCLNCGFETHADEQAALNIARSWLFLRSQEYKKYQTNKTTGNTDKRAFVETWQSFYRKKLKEVWKPAV

SEQ ID NO: 157 - protein, 979 aa, synthetic construct
QEIKRINKIRRRLVKDSNTKKAGKTGPMKTLLVRVMTPDLRERLENLRKKPENIPQPISNTSRANLNKLLTDYTEMKKAILHVYWEEFQKDPVGLMSRVAQPASKKIDQNKLKPEMDEKGNLTTAGFACSQCGQPLFVYKLEQVSEKGKAYTNYFGRCNVAEHEKLILLAQLKPEKDSDEAVTYSLGKFGQRALDFYSIHVTKESTHPVKPLAQIAGNRYASGPVGKALSDACMGTIASFLSKYQDIIIEHQKVVKGNQKRLESLRELAGKENLEYPSVTLPPQPHTKEGVDAYNEVIARVRMWVNLNLWQKLKLSRDDAKPLLRLKGFPSFPLVERQANEVDWWDMVCNVKKLINEKKEDGKVFWQNLAGYKRQEALRPYLSSEEDRKKGKKFARYQLGDLLLHLEKKHGEDWGKVYDEAWERIDKKVEGLSKHIKLEEERRSEDAQSKAALTDWLRAKASFVIEGLKEADKDEFCRCELKLQKWYGDLRGKPFAIEAENSILDISGFSKQYNCAFIWQKDGVKKLNLYLIINYFKGGKLRFKKIKPEAFEANRFYTVINKKSGEIVPMEVNFNFDDPNLIILPLAFGKRQGREFIWNDLLSLETGSLKLANGRVIEKTLYNRRTRQDEPALFVALTFERREVLDSSNIKTPMNLIGVDRGENIPAVIALTDPEGCPLSRFKDSLGNPTHILRIGESYKEKQRTIQAKKEVEQRRAGGYSRKYASKAKNLADDMVRNTARDLLYYAVTQDAMLIFENLSRGFGRQGKRTFMAERQYTRMEDWLTAKLAYEGLPSKTYLSKTLAQYTSKTCSNCGFTITSADYDRVLEKLKKTATGWMTTINGKELKVEGQITYYNRYKRQNVVKDLSVELDRLSEESVNNDISSWTKGRSGEALSLLKKRFSHRPVQEKFVCLNCGFETHADEQAALNIARSWLFLRSQEYKKYQTNKTTGNTDKRAFVETWQSFYRKKLKEVWKPAV

SEQ ID NO: 158 - protein, 979 aa, synthetic construct
QEIKRINKIRRRLVKDSNTKKAGKTGPMKTLLVRVMTPDLRERLENLRKKPENIPQPISNTSRANLNKLLTDYTEMKKAILHVYWEEFQKDPVGLMSRVAQPASKKIDQNKLKPEMDEKGNLTTAGFACSQCGQPLFVYKLEQVSEKGKAYTNYFGRCNVAEHEKLILLAQLKPEKDSDEAVTYSLGKFGQRALDFYSIHVTKESTHPVKPLAQIAGNRYASGPVGKALSDACMGTIASFLSKYQDIIIEHQKVVKGNQKRLESLRELAGKENLEYPSVTLPPQPHTKEGVDAYNEVIARVRMWVNLNLWQKLKLSRDDAKPLLRLKGFPSFPLVERQANEVDWWDMVCNVKKLINEKKEDGKVFWQNLAGYKRQEALRPYLSSEEDRKKGKKFARYQLGDLLLHLEKKHGEDWGKVYDEAWERIDKKVEGLSKHIKLEEERRSEDAQSKAALTDWLRAKASFVIEGLKEADKDEFCRCELKLQKWYGDLRGKPFAIEAENSILDISGFSKQYNCAFIWQKDGVKKLNLYLIINYFKGGKLRFKKIKPEAFEANRFYTVINKKSGEIVPMEVNFNFDDPNLIILPLAFGKRQGREFIWNDLLSLETGSLKLANGRVIEKTLYNRRTRQDEPALFVALTFERREVLDSSNIKNPMNLIGVDRGENIPAVIALTDPEGCPLSRFKDSLGNPTHILRIGESYKEKQRTIQAKKEVEQRRAGGYSRKYASKAKNLADDMVRNTARDLLYYAVTQDAMLIFENLSRGFGRQGKRTFMAERQYTRMEDWLTAKLAYEGLPSKTYLSKTLAQYTSKTCSNCGFTITSADYDRVLEKLKKTATGWMTTINGKELKVEGQITYYNRYKRQNVVKDLSVELDRLSEESVNNDISSWTKGRSGEALSLLKKRFSHRPVQEKFVCLNCGFETHADEQAALNIARSWLFLRSQEYKKYQTNKTTGNTDKRAFVETWQSFYRKKLKEVWKPAV

SEQ ID NO: 159 - protein, 979 aa, synthetic construct
QEIKRINKIRRRLVKDSNTKKAGKTGPMKTLLVRVMTPDLRERLENLRKKPENIPQPISNTSRANLNKLLTDYTEMKKAILHVYWEEFQKDPVGLMSRVAQPASKKIDQNKLKPEMDEKGNLTTAGFACSQCGQPLFVYKLEQVSEKGKAYTNYFGRCNVAEHEKLILLAQLKPEKDSDEAVTYSLGKFGQRALDFYSIHVTKESTHPVKPLAQIAGNRYASGPVGKALSDACMGTIASFLSKYQDIIIEHQKVVKGNQKRLESLRELAGKENLEYPSVTLPPQPHTKEGVDAYNEVIARVRMWVNLNLWQKLKLSRDDAKPLLRLKGFPSFPLVERQANEVDWWDMVCNVKKLINEKKEDGKVFWQNLAGYKRQEALRPYLSSEEDRKKGKKFARYQLGDLLLHLEKKHGEDWGKVYDEAWERIDKKVEGLSKHIKLEEERRSEDAQSKAALTDWLRAKASFVIEGLKEADKDEFCRCELKLQKWYGDLRGKPFAIEAENSILDISGFSKQYNCAFIWQKDGVKKLNLYLIINYFKGGKLRFKKIKPEAFEANRFYTVINKKSGEIVPMEVNFNFDDPNLIILPLAFGKRQGREFIWNDLLSLETGSLKLANGRVIEKTLYNRRTRQDEPALFVALTFERREVLDSSNIKPRMNLIGVDRGENIPAVIALTDPEGCPLSRFKDSLGNPTHILRIGESYKEKQRTIQAKKEVEQRRAGGYSRKYASKAKNLADDMVRNTARDLLYYAVTQDAMLIFENLSRGFGRQGKRTFMAERQYTRMEDWLTAKLAYEGLPSKTYLSKTLAQYTSKTCSNCGFTITSADYDRVLEKLKKTATGWMTTINGKELKVEGQITYYNRYKRQNVVKDLSVELDRLSEESVNNDISSWTKGRSGEALSLLKKRFSHRPVQEKFVCLNCGFETHADEQAALNIARSWLFLRSQEYKKYQTNKTTGNTDKRAFVETWQSFYRKKLKEVWKPAV

SEQ ID NO: 160 - protein, 979 aa, synthetic construct
QEIKRINKIRRRLVKDSNTKKAGKTGPMKTLLVRVMTPDLRERLENLRKKPENIPQPISNTSRANLNKLLTDYTEMKKAILHVYWEEFQKDPVGLMSRVAQPASKKIDQNKLKPEMDEKGNLTTAGFACSQCGQPLFVYKLEQVSEKGKAYTNYFGRCNVAEHEKLILLAQLKPEKDSDEAVTYSLGKFGQRALDFYSIHVTKESTHPVKPLAQIAGNRYASGPVGKALSDACMGTIASFLSKYQDIIIEHQKVVKGNQKRLESLRELAGKENLEYPSVTLPPQPHTKEGVDAYNEVIARVRMWVNLNLWQKLKLSRDDAKPLLRLKGFPSFPLVERQANEVDWWDMVCNVKKLINEKKEDGKVFWQNLAGYKRQEALRPYLSSEEDRKKGKKFARYQLGDLLLHLEKKHGEDWGKVYDEAWERIDKKVEGLSKHIKLEEERRSEDAQSKAALTDWLRAKASFVIEGLKEADKDEFCRCELKLQKWYGDLRGKPFAIEAENSILDISGFSKQYNCAFIWQKDGVKKLNLYLIINYFKGGKLRFKKIKPEAFEANRFYTVINKKSGEIVPMEVNFNFDDPNLIILPLAFGKRQGREFIWNDLLSLETGSLKLANGRVIEKTLYNRRTRQDEPALFVALTFERREVLDSSNIKPMSNLIGVDRGENIPAVIALTDPEGCPLSRFKDSLGNPTHILRIGESYKEKQRTIQAKKEVEQRRAGGYSRKYASKAKNLADDMVRNTARDLLYYAVTQDAMLIFENLSRGFGRQGKRTFMAERQYTRMEDWLTAKLAYEGLPSKTYLSKTLAQYTSKTCSNCGFTITSADYDRVLEKLKKTATGWMTTINGKELKVEGQITYYNRYKRQNVVKDLSVELDRLSEESVNNDISSWTKGRSGEALSLLKKRFSHRPVQEKFVCLNCGFETHADEQAALNIARSWLFLRSQEYKKYQTNKTTGNTDKRAFVETWQSFYRKKLKEVWKPAV

SEQ ID NO: 161 - protein, 978 aa, synthetic construct
QEIKRINKIRRRLVKDSNTKKAGKTGPMKTLLVRVMTPDLRERLENLRKKPENIPQPISNTSRANLNKLLTDYTEMKKAILHVYWEEFQKDPVGLMSRVAQPASKKIDQNKLKPEMDEKGNLTTAGFACSQCGQPLFVYKLEQVSEKGKAYTNYFGRCNVAEHEKLILLAQLKPEKDSDEAVTYSLGKFGQRALDFYSIHVTKESTHPVKPLAQIAGNRYASGPVGKALSDACMGTIASFLSKYQDIIIEHQKVVKGNQKRLESLRELAGKENLEYPSVTLPPQPHTKEGVDAYNEVIARVRMWVNLNLWQKLKLSRDDAKPLLRLKGFPSFPLVERQANEVDWWDMVCNVKKLINEKKEDGKVFWQNLAGYKRQEALRPYLSSEEDRKKGKKFARYQLGDLLLHLEKKHGEDWGKVYDEAWERIDKKVEGLSKHIKLEEERRSEDAQSKAALTDWLRAKASFVIEGLKEADKDEFCRCELKLQKWYGDLRGKPFAIEAENSILDISGFSKQYNCAFIWQKDGVKKLNLYLIINYFKGGKLRFKKIKPEAFEANRFYTVINKKSGEIVPMEVNFNFDDPNLIILPLAFGKRQGREFIWNDLLSLETGSLKLANGRVIEKTLYNRRTRQDEPALFVALTFERREVLDSSNIKPMNLIGVDRGENIPAVIALTDPEGCPLSRFKDSLGNPTHILRIWESYKEKQRTIQAKKEVEQRRAGGYSRKYASKAKNLADDMVRNTARDLLYYAVTQDAMLIFENLSRGFGRQGKRTFMAERQYTRMEDWLTAKLAYEGLPSKTYLSKTLAQYTSKTCSNCGFTITSADYDRVLEKLKKTATGWMTTINGKELKVEGQITYYNRYKRQNVVKDLSVELDRLSEESVNNDISSWTKGRSGEALSLLKKRFSHRPVQEKFVCLNCGFETHADEQAALNIARSWLFLRSQEYKKYQTNKTTGNTDKRAFVETWQSFYRKKLKEVWKPAV

SEQ ID NO: 162 - protein, 978 aa, synthetic construct
QEIKRINKIRRRLVKDSNTKKAGKTGPMKTLLVRVMTPDLRERLENLRKKPENIPQPISNTSRANLNKLLTDYTEMKKAILHVYWEEFQKDPVGLMSRVAQPASKKIDQNKLKPEMDEKGNLTTAGFACSQCGQPLFVYKLEQVSEKGKAYTNYFGRCNVAEHEKLILLAQLKPEKDSDEAVTYSLGKFGQRALDFYSIHVTKESTHPVKPLAQIAGNRYASGPVGKALSDACMGTIASFLSKYQDIIIEHQKVVKGNQKRLESLRELAGKENLEYPSVTLPPQPHTKEGVDAYNEVIARVRMWVNLNLWQKLKLSRDDAKPLLRLKGFPSFPLVERQANEVDWWDMVCNVKKLINEKKEDGKVFWQNLAGYKRQEALRPYLSSEEDRKKGKKFARYQLGDLLLHLEKKHGEDWGKVYDEAWERIDKKVEGLSKHIKLEEERRSEDAQSKAALTDWLRAKASFVIEGLKEADKDEFCRCELKLQKWYGDLRGKPFAIEAENSILDISGFSKQYNCAFIWQKDGVKKLNLYLIINYFKGGKLRFKKIKPEAFEANRFYTVINKKSGEIVPMEVNFNFDDPNLIILPLAFGKRQGREFIWNDLLSLETGSLKLANGRVIEKTLYNRRTRQDEPALFVALTFERREVLDSSNIKPMNLIGVDRGENIPAVIALTDPEGCPLSRFKDSLGNPTHILRIRESYKEKQRTIQAKKEVEQRRAGGYSRKYASKAKNLADDMVRNTARDLLYYAVTQDAMLIFENLSRGFGRQGKRTFMAERQYTRMEDWLTAKLAYEGLPSKTYLSKTLAQYTSKTCSNCGFTITSADYDRVLEKLKKTATGWMTTINGKELKVEGQITYYNRYKRQNVVKDLSVELDRLSEESVNNDISSWTKGRSGEALSLLKKRFSHRPVQEKFVCLNCGFETHADEQAALNIARSWLFLRSQEYKKYQTNKTTGNTDKRAFVETWQSFYRKKLKEVWKPAV

SEQ ID NO: 163 - protein, 978 aa, synthetic construct
QEIKRINKIRRRLVKDSNTKKAGKTGPMKTLLVRVMTPDLRERLENLRKKPENIPQPISNTSRANLNKLLTDYTEMKKAILHVYWEEFQKDPVGLMSRVAQPASKKIDQNKLKPEMDEKGNLTTAGFACSQCGQPLFVYKLEQVSEKGKAYTNYFGRCNVAEHEKLILLAQLKPEKDSDEAVTYSLGKFGQRALDFYSIHVTKESTHPVKPLAQIAGNRYASGPVGKALSDACMGTIASFLSKYQDIIIEHQKVVKGNQKRLESLRELAGKENLEYPSVTLPPQPHTKEGVDAYNEVIARVRMWVNLNLWQKLKLSRDDAKPLLRLKGFPSFPLVERQANEVDWWDMVCNVKKLINEKKEDGKVFWQNLAGYKRQEALRPYLSSEEDRKKGKKFARYQLGDLLLHLEKKHGEDWGKVYDEAWERIDKKVEGLSKHIKLEEERRSEDAQSKAALTDWLRAKASFVIEGLKEADKDEFCRCELKLQKWYGDLRGKPFAIEAENSILDISGFSKQYNCAFIWQKDGVKKLNLYLIINYFKGGKLRFKKIKPEAFEANRFYTVINKKSGEIVPMEVNFNFDDPNLIILPLAFGKRQGREFIWNDLLSLETGSLKLANGRVIEKTLYNRRTRQDEPALFVALTFERREVLDSSNIKPMNLIGVDRGENIPAVIALTDPEGCPLSRFKDSLGNPTHILRIGESYKEKQRTIQASKEVEQRRAGGYSRKYASKAKNLADDMVRNTARDLLYYAVTQDAMLIFENLSRGFGRQGKRTFMAERQYTRMEDWLTAKLAYEGLPSKTYLSKTLAQYTSKTCSNCGFTITSADYDRVLEKLKKTATGWMTTINGKELKVEGQITYYNRYKRQNVVKDLSVELDRLSEESVNNDISSWTKGRSGEALSLLKKRFSHRPVQEKFVCLNCGFETHADEQAALNIARSWLFLRSQEYKKYQTNKTTGNTDKRAFVETWQSFYRKKLKEVWKPAV

SEQ ID NO: 164 - protein, 978 aa, synthetic construct
QEIKRINKIRRRLVKDSNTKKAGKTGPMKTLLVRVMTPDLRERLENLRKKPENIPQPISNTSRANLNKLLTDYTEMKKAILHVYWEEFQKDPVGLMSRVAQPASKKIDQNKLKPEMDEKGNLTTAGFACSQCGQPLFVYKLEQVSEKGKAYTNYFGRCNVAEHEKLILLAQLKPEKDSDEAVTYSLGKFGQRALDFYSIHVTKESTHPVKPLAQIAGNRYASGPVGKALSDACMGTIASFLSKYQDIIIEHQKVVKGNQKRLESLRELAGKENLEYPSVTLPPQPHTKEGVDAYNEVIARVRMWVNLNLWQKLKLSRDDAKPLLRLKGFPSFPLVERQANEVDWWDMVCNVKKLINEKKEDGKVFWQNLAGYKRQEALRPYLSSEEDRKKGKKFARYQLGDLLLHLEKKHGEDWGKVYDEAWERIDKKVEGLSKHIKLEEERRSEDAQSKAALTDWLRAKASFVIEGLKEADKDEFCRCELKLQKWYGDLRGKPFAIEAENSILDISGFSKQYNCAFIWQKDGVKKLNLYLIINYFKGGKLRFKKIKPEAFEANRFYTVINKKSGEIVPMEVNFNFDDPNLIILPLAFGKRQGREFIWNDLLSLETGSLKLANGRVIEKTLYNRRTRQDEPALFVALTFERREVLDSSNIKPMNLIGVDRGENIPAVIALTDPEGCPLSRFKDSLGNPTHILRIGESYKEKQRTIQAKKEVEQRRAGGYSRKYASKAKNLADDMVHNTARDLLYYAVTQDAMLIFENLSRGFGRQGKRTFMAERQYTRMEDWLTAKLAYEGLPSKTYLSKTLAQYTSKTCSNCGFTITSADYDRVLEKLKKTATGWMTTINGKELKVEGQITYYNRYKRQNVVKDLSVELDRLSEESVNNDISSWTKGRSGEALSLLKKRFSHRPVQEKFVCLNCGFETHADEQAALNIARSWLFLRSQEYKKYQTNKTTGNTDKRAFVETWQSFYRKKLKEVWKPAV

SEQ ID NO: 165 - protein, 978 aa, synthetic construct
QEIKRINKIRRRLVKDSNTKKAGKTGPMKTLLVRVMTPDLRERLENLRKKPENIPQPISNTSRANLNKLLTDYTEMKKAILHVYWEEFQKDPVGLMSRVAQPASKKIDQNKLKPEMDEKGNLTTAGFACSQCGQPLFVYKLEQVSEKGKAYTNYFGRCNVAEHEKLILLAQLKPEKDSDEAVTYSLGKFGQRALDFYSIHVTKESTHPVKPLAQIAGNRYASGPVGKALSDACMGTIASFLSKYQDIIIEHQKVVKGNQKRLESLRELAGKENLEYPSVTLPPQPHTKEGVDAYNEVIARVRMWVNLNLWQKLKLSRDDAKPLLRLKGFPSFPLVERQANEVDWWDMVCNVKKLINEKKEDGKVFWQNLAGYKRQEALRPYLSSEEDRKKGKKFARYQLGDLLLHLEKKHGEDWGKVYDEAWERIDKKVEGLSKHIKLEEERRSEDAQSKAALTDWLRAKASFVIEGLKEADKDEFCRCELKLQKWYGDLRGKPFAIEAENSILDISGFSKQYNCAFIWQKDGVKKLNLYLIINYFKGGKLRFKKIKPEAFEANRFYTVINKKSGEIVPMEVNFNFDDPNLIILPLAFGKRQGREFIWNDLLSLETGSLKLANGRVIEKTLYNRRTRQDEPALFVALTFERREVLDSSNIKPMNLIGVDRGENIPAVIALTDPEGCPLSRFKDSLGNPTHILRIGESYKEKQRTIQAKKEVEQRRAGGYSRKYASKAKNLADDMVRNTARDLLYYAVTQDAMLIFENLSRGFGRQGKRTFSAERQYTRMEDWLTAKLAYEGLPSKTYLSKTLAQYTSKTCSNCGFTITSADYDRVLEKLKKTATGWMTTINGKELKVEGQITYYNRYKRQNVVKDLSVELDRLSEESVNNDISSWTKGRSGEALSLLKKRFSHRPVQEKFVCLNCGFETHADEQAALNIARSWLFLRSQEYKKYQTNKTTGNTDKRAFVETWQSFYRKKLKEVWKPAV

SEQ ID NO: 166 - protein, 978 aa, synthetic construct
QEIKRINKIRRRLVKDSNTKKAGKTGPMKTLLVRVMTPDLRERLENLRKKPENIPQPISNTSRANLNKLLTDYTEMKKAILHVYWEEFQKDPVGLMSRVAQPASKKIDQNKLKPEMDEKGNLTTAGFACSQCGQPLFVYKLEQVSEKGKAYTNYFGRCNVAEHEKLILLAQLKPEKDSDEAVTYSLGKFGQRALDFYSIHVTKESTHPVKPLAQIAGNRYASGPVGKALSDACMGTIASFLSKYQDIIIEHQKVVKGNQKRLESLRELAGKENLEYPSVTLPPQPHTKEGVDAYNEVIARVRMWVNLNLWQKLKLSRDDAKPLLRLKGFPSFPLVERQANEVDWWDMVCNVKKLINEKKEDGKVFWQNLAGYKRQEALRPYLSSEEDRKKGKKFARYQLGDLLLHLEKKHGEDWGKVYDEAWERIDKKVEGLSKHIKLEEERRSEDAQSKAALTDWLRAKASFVIEGLKEADKDEFCRCELKLQKWYGDLRGKPFAIEAENSILDISGFSKQYNCAFIWQKDGVKKLNLYLIINYFKGGKLRFKKIKPEAFEANRFYTVINKKSGEIVPMEVNFNFDDPNLIILPLAFGKRQGREFIWNDLLSLETGSLKLANGRVIEKTLYNRRTRQDEPALFVALTFERREVLDSSNIKPMNLIGVDRGENIPAVIALTDPEGCPLSRFKDSLGNPTHILRIGESYKEKQRTIQAKKEVEQRRAGGYSRKYASKAKNLADDMVRNTARDLLYYAVTQDAMLIFENLSRGFGRQGKRTFAAERQYTRMEDWLTAKLAYEGLPSKTYLSKTLAQYTSKTCSNCGFTITSADYDRVLEKLKKTATGWMTTINGKELKVEGQITYYNRYKRQNVVKDLSVELDRLSEESVNNDISSWTKGRSGEALSLLKKRFSHRPVQEKFVCLNCGFETHADEQAALNIARSWLFLRSQEYKKYQTNKTTGNTDKRAFVETWQSFYRKKLKEVWKPAV

SEQ ID NO: 167 - protein, 978 aa, synthetic construct
QEIKRINKIRRRLVKDSNTKKAGKTGPMKTLLVRVMTPDLRERLENLRKKPENIPQPISNTSRANLNKLLTDYTEMKKAILHVYWEEFQKDPVGLMSRVAQPASKKIDQNKLKPEMDEKGNLTTAGFACSQCGQPLFVYKLEQVSEKGKAYTNYFGRCNVAEHEKLILLAQLKPEKDSDEAVTYSLGKFGQRALDFYSIHVTKESTHPVKPLAQIAGNRYASGPVGKALSDACMGTIASFLSKYQDIIIEHQKVVKGNQKRLESLRELAGKENLEYPSVTLPPQPHTKEGVDAYNEVIARVRMWVNLNLWQKLKLSRDDAKPLLRLKGFPSFPLVERQANEVDWWDMVCNVKKLINEKKEDGKVFWQNLAGYKRQEALRPYLSSEEDRKKGKKFARYQLGDLLLHLEKKHGEDWGKVYDEAWERIDKKVEGLSKHIKLEEERRSEDAQSKAALTDWLRAKASFVIEGLKEADKDEFCRCELKLQKWYGDLRGKPFAIEAENSILDISGFSKQYNCAFIWQKDGVKKLNLYLIINYFKGGKLRFKKIKPEAFEANRFYTVINKKSGEIVPMEVNFNFDDPNLIILPLAFGKRQGREFIWNDLLSLETGSLKLANGRVIEKTLYNRRTRQDEPALFVALTFERREVLDSSNIKPMNLIGVDRGENIPAVIALTDPEGCPLSRFKDSLGNPTHILRIGESYKEKQRTIQAKKEVEQRRAGGYSRKYASKAKNLADDMVRNTARDLLYYAVTQDAMLIFENLSRGFGRQGKRTFMAERQYTRMEDWLTAKLAYEGLPSKTYLSKTLAQYTSKTCSNCGFTITSADYDRVLEKLKKTATGWMTTINGKELKVEGQITYYNRYKRQNVVKDLSVELDRLSEESVNNDISSWDKGRSGEALSLLKKRFSHRPVQEKFVCLNCGFETHADEQAALNIARSWLFLRSQEYKKYQTNKTTGNTDKRAFVETWQSFYRKKLKEVWKPAV

SEQ ID NO: 168 - protein, 979 aa, synthetic construct
QEIKRINKIRRRLVKDSNTKKAGKTGPMKTLLVRVMTPDLRERLENLRKKPENIPQPISNTSRANLNKLLTDYTEMKKAILHVYWEEFQKDPVGLMSRVAQPASKKIDQNKLKPEMDEKGNLTTAGFACSQCGQPLFVYKLEQVSEKGKAYTNYFGRCNVAEHEKLILLAQLKPEKDSDEAVTYSLGKFGQRALDFYSIHVTKESTHPVKPLAQIAGNRYASGPVGKALSDACMGTIASFLSKYQDIIIEHQKVVKGNQKRLESLRELAGKENLEYPSVTLPPQPHTKEGVDAYNEVIARVRMWVNLNLWQKLKLSRDDAKPLLRLKGFPSFPLVERQANEVDWWDMVCNVKKLINEKKEDGKVFWQNLAGYKRQEALRPYLSSEEDRKKGKKFARYQLGDLLLHLEKKHGEDWGKVYDEAWERIDKKVEGLSKHIKLEEERRSEDAQSKAALTDWLRAKASFVIEGLKEADKDEFCRCELKLQKWYGDLRGKPFAIEAENSILDISGFSKQYNCAFIWQKDGVKKLNLYLIINYFKGGKLRFKKIKPEAFEANRFYTVINKKSGEIVPMEVNFNFDDPNLIILPLAFGKRQGREFIWNDLLSLETGSLKLANGRVIEKTLYNRRTRQDEPALFVALTFERREVLDSSNIKPMNLIGVDRGENIPAVIALTDPEGCPLSRFKDSLGNPTHILRIGESYKEKQRTIQAKKEVEQRRAGGYSRKYASKAKNLADDMVRNTARDLLYYAVTQDAMLIFENLSRGFGRQGKRTFMAERQYTRMEDWLTAKLAYEGLPSKTYLSKTLAQYTSKTCSNCGFTITSADYDRVLEKLKKTATGWMTTINGKELKVEGQITYYNRYKRQNVVKDLSVELDRLSEESVNNDISSWTKGRSGNEALSLLKKRFSHRPVQEKFVCLNCGFETHADEQAALNIARSWLFLRSQEYKKYQTNKTTGNTDKRAFVETWQSFYRKKLKEVWKPAV

SEQ ID NO: 169 - protein, 978 aa, synthetic construct
QEIKRINKIRRRLVKDSNTKKAGKTGPMKTLLVRVMTPDLRERLENLRKKPENIPQPISNTSRANLNKLLTDYTEMKKAILHVYWEEFQKDPVGLMSRVAQPASKKIDQNKLKPEMDEKGNLTTAGFACSQCGQPLFVYKLEQVSEKGKAYTNYFGRCNVAEHEKLILLAQLKPEKDSDEAVTYSLGKFGQRALDFYSIHVTKESTHPVKPLAQIAGNRYASGPVGKALSDACMGTIASFLSKYQDIIIEHQKVVKGNQKRLESLRELAGKENLEYPSVTLPPQPHTKEGVDAYNEVIARVRMWVNLNLWQKLKLSRDDAKPLLRLKGFPSFPLVERQANEVDWWDMVCNVKKLINEKKEDGKVFWQNLAGYKRQEALRPYLSSEEDRKKGKKFARYQLGDLLLHLEKKHGEDWGKVYDEAWERIDKKVEGLSKHIKLEEERRSEDAQSKAALTDWLRAKASFVIEGLKEADKDEFCRCELKLQKWYGDLRGKPFAIEAENSILDISGFSKQYNCAFIWQKDGVKKLNLYLIINYFKGGKLRFKKIKPEAFEANRFYTVINKKSGEIVPMEVNFNFDDPNLIILPLAFGKRQGREFIWNDLLSLETGSLKLANGRVIEKTLYNRRTRQDEPALFVALTFERREVLDSSNIKPMNLIGVDRGENIPAVIALTDPEGCPLSRFKDSLGNPTHILRIGESYKEKQRTIQAKKEVEQRRAGGYSRKYASKAKNLADDMVRNTARDLLYYAVTQDAMLIFENLSRGFGRQGKRTFMAERQYTRMEDWLTAKLAYEGLPSKTYLSKTLAQYTSKTCSNCGFTITSADYDRVLEKLKKTATGWMTTINGKELKVEGQITYYNRYKRQNVVKDLSVELDRLSEESVNNDISSWTKGRSGEALSLLKKRFSHRPVQEKFVCLNCGFETHADEQAALNIARVWLFLRSQEYKKYQTNKTTGNTDKRAFVETWQSFYRKKLKEVWKPAV

SEQ ID NO: 170 - protein, 978 aa, synthetic construct
QEIKRINKIRRRLVKDSNTKKAGKTGPMKTLLVRVMTPDLRERLENLRKKPENIPQPISNTSRANLNKLLTDYTEMKKAILHVYWEEFQKDPVGLMSRVAQPASKKIDQNKLKPEMDEKGNLTTAGFACSQCGQPLFVYKLEQVSEKGKAYTNYFGRCNVAEHEKLILLAQLKPEKDSDEAVTYSLGKFGQRALDFYSIHVTKESTHPVKPLAQIAGNRYASGPVGKALSDACMGTIASFLSKYQDIIIEHQKVVKGNQKRLESLRELAGKENLEYPSVTLPPQPHTKEGVDAYNEVIARVRMWVNLNLWQKLKLSRDDAKPLLRLKGFPSFPLVERQANEVDWWDMVCNVKKLINEKKEDGKVFWQNLAGYKRQEALRPYLSSEEDRKKGKKFARYQLGDLLLHLEKKHGEDWGKVYDEAWERIDKKVEGLSKHIKLEEERRSEDAQSKAALTDWLRAKASFVIEGLKEADKDEFCRCELKLQKWYGDLRGKPFAIEAENSILDISGFSKQYNCAFIWQKDGVKKLNLYLIINYFKGGKLRFKKIKPEAFEANRFYTVINKKSGEIVPMEVNFNFDDPNLIILPLAFGKRQGREFIWNDLLSLETGSLKLANGRVIEKTLYNRRTRQDEPALFVALTFERREVLDSSNIKPMNLIGVDRGENIPAVIALTDPEGCPLSRFKDSLGNPTHILRIGESYKEKQRTIQAKKEVEQRRAGGYSRKYASKAKNLADDMVRNTARDLLYYAVTQDAMLIFENLSRGFGRQGKRTFMAERQYTRMEDWLTAKLAYEGLPSKTYLSKTLAQYTSKTCSNCGFTITSADYDRVLEKLKKTATGWMTTINGKELKVEGQITYYNRYKRQNVVKDLSVELDRLSEESVNNDISSWTKGRSGEALSLLKKRFSHRPVQEKFVCLNCGFETHADEQAALNIARSWLFLRSQEYKKYQTNKTTINTDKRAFVETWQSFYRKKLKEVWKPAV

SEQ ID NO: 171 - protein, 977 aa, synthetic construct
QEIKRINKIRRRLVKDSNTKKAGKTGPMKTLLVRVMTPDLRERLENLRKKPENIPQPISNTSRANLNKLLTDYTEMKKAILHVYWEEFQKDPVGLMSRVAQPASKKIDQNKLKPEMDEKGNLTTAGFACSQCGQPLFVYKLEQVSEKGKAYTNYFGRCNVAEHEKLILLAQLKPEKDSDEAVTYSLGKFGQRALDFYSIHVTKESTHPVKPLAQIAGNRYASGPVGKALSDACMGTIASFLSKYQDIIIEHQKVVKGNQKRLESLRELAGKENLEYPSVTLPPQPHTKEGVDAYNEVIARVRMWVNLNLWQKLKLSRDDAKPLLRLKGFPSFPLVERQANEVDWWDMVCNVKKLINEKKEDGKVFWQNLAGYKRQEALRPYLSSPEDRKKGKKFARYQFGDLLLHLEKKHGEDWGKVYDEAWERIDKKVEGLSKHIKLEEERRSEDAQSKAALTDWLRAKASFVIEGLKEADKDEFCRCELKLQKWYGDLRGKPFAIEAENSILDISGFSKQYNCAFIWQKDGVKKLNLYLIINYFKGGKLRFKKIKPEAFEANRFYTVINKKSGEIVPMEVNFNFDDPNLIILPLAFGKRQGREFIWNDLLSLETGSLKLANGRVIEKTLYNRRTRQDEPALFVALTFERREVLDSSNIKPMNLIGVDRGENIPAVIALTDPEGCPLSRFKDSLGNPTHILRIGESYKEKQRTIQAKKEVEQRRAGGYSRKYASKAKNLANDMVRNTARDLLYYAVTQDAMLIFENLSRGFGRQGKRTFMAERQYTRMEDWLTAKLAYEGLSKTYLSKTLAQYTSKTCSNCGFTITSADYDRVLEKLKKTATGWMTTINGKELKVEGQITYYNRRKRQNVVKDLSVELDRLSEESVNNDISSWTKGRSGEALSLLKKRFSHRPVQEKFVCLNCGFETHADEQAALNIARSWLFLRSQEYKKYQTNKTTGNTDKRAFVETWQSFYRKKLKEVWKPAV

SEQ ID NO: 172 - protein, 977 aa, synthetic construct
QEIKRINKIRRRLVKDSNTKKAGKTGPMKTLLVRVMTPDLRERLENLRKKPENIPQPISNTSRANLNKLLTDYTEMKKAILHVYWEEFQKDPVGLMSRVAQPASKKIDQNKLKPEMDEKGNLTTAGFACSQCGQPLFVYKLEQVSEKGKAYTNYFGRCNVAEHEKLILLAQLKPEKDSDEAVTYSLGKFGQRALDFYSIHVTKESTHPVKPLAQIAGNRYASGPVGKALSDACMGTIASFLSKYQDIIIEHQKVVKGNQKRLESLRELAGKENLEYPSVTLPPQPHTKEGVDAYNEVIARVRMWVNLNLWQKLKLSRDDAKPLLRLKGFPSFPLVERQANEVDWWDMVCNVKKLINEKKEDGKVFWQNLAGYKRQEALRPYLSSEEDRKKGKKFARYQLGDLLLHLEKKHGEDWGKVYDEAWERIDKKVEGLSKHIKLEEERRSEDAQSKAALTDWLRAKASFVIEGLKEADKDEFSRCELKLQKWYGDLRGKPFAIEAENSILDISGFSKQYNCAFIWQKDGVKKLNLYLIINYFKGGKLRFKKIKPEAFEANRFYTVINKKSGEIVPMEVNFNFDDPNLIILPLAFGKRQGREFIWNDLLSLETGSLKLANGRVIEKTLYNRRTRQDEPALFVALTFERREVLDSSNIKPMNLIGVDRGENIPAVIALTDPEGCPLSRFKDSLGNPTHILRIGESYKEKQRTIQAKKEVEQRRAGGYSRKYASKAKNLADDMVRNTARDLLYYAVTQDAMLIFENLSRGFGRQGKRTFMAERQYTRMEDWLTAKLAYEGLSKTYLSKTLAQYTSKTCSNCGFTITSADYDRVLEKLKKTATGWMTTINGKELKVEGQITYYNRRKRQNVVKDLSVELDRLSEESVNNDISSWTKGRSGEALSLLKKRFSHRPVQEKFVCLNCGFETHADEQAALNIARSWLFLRSQEYKKYQTNKTTGNTDKRAFVETWQSFYRKKLKEVWKPAV

SEQ ID NO: 173 - protein, 977 aa, synthetic construct
QEIKRINKIRRRLVKDSNTKKAGKTGPMKTLLVRVMTPDLRERLENLRKKPENIPQPISNTSRANLNKLLTDYTEMKKAILHVYWEEFQKDPVGLMSRVAQPASKKIDQNKLKPEMDEKGNLTTAGFACSQCGQPLFVYKLEQVSEKGKAYTNYFGRCNVAEHEKLILLAQLKPEKDSDEAVTYSLGKFGQRALDFYSIHVTKESTHPVKPLAQIAGNRYASGPVGKALSDACMGTIASFLSKYQDIIIEHQKVVKGNQKRLESLRELAGKENLEYPSVTLPPQPHTKEGVDAYNEVIARVRMWVNLNLWQKLKLSRDDAKPLLRLKGFPSFPLVERQANEVDWWDMVCNVKKLINEKKEDGKVFWQNLAGYKRQEALRPYLSSENDRKKGKKFARYQFGDLLKHLEKKHGEDWGKVYDEAWERIDKKVEGLSKHIKLEEERRSEDAQSKAALTDWLRAKASFVIEGLKEADKDEFSRCELKLQKWYGDLRGKPFAIEAENSILDISGFSKQYNCAFIWQKDGVKKLNLYLIINYFKGGKLRFKKIKPEAFEANRFYTVINKKSGEIVPMEVNFNFDDPNLIILPLAFGKRQGREFIWNDLLSLETGSLKLANGRVIEKTLYNRRTRQDEPALFVALTFERREVLDSSNIKPMNLIGVDRGENIPAVIALTDPEGCPLSRFKDSLGNPTHILRIGESYKEKQRTIQAKKEVEQRRAGGYSRKYASKAKNLADDMVRNTARDLLYYAVTQDAMLIFENLSRGFGRQGKRTFMAERQYTRMEDWLTAKLAYEGLSKTLLSKTLAQYTSKTCSNCGFTITSADYDRVLEKLKKTATGWMTTINGKELKVEGQITYYNRRKRQNVVKDLSVELDRLSEESVNNDISSWTKGRSGEALSLLKKRFSHRPVQEKFVCLNCGFETHADEQAALNIARSWLFLRSQEYKKYQTNKTTGNTDKRAFVETWQSFYRKKLKEVWKPAV

SEQ ID NO: 174 - protein, 977 aa, synthetic construct
QEIKRINKIRRRLVKDSNTKKAGKTGPMKTLLVRVMTPDLRERLENLRKKPENIPQPISNTSRANLNKLLTDYTEMKKAILHVYWEEFQKDPVGLMSRVAQPASKKIDQNKLKPEMDEKGNLTTAGFACSQCGQPLFVYKLEQVSEKGKAYTNYFGRCNVAEHEKLILLAQLKPEKDSDEAVTYSLGKFGQRALDFYSIHVTKESTHPVKPLAQIAGNRYASGPVGKALSDACMGTIASFLSKYQDIIIEHQKVVKGNQKRLESLRELAGKENLEYPSVTLPPQPHTKEGVDAYNEVIARVRMWVNLNLWQKLKLSRDDAKPLLRLKGFPSFPLVERQANEVDWWDMVCNVKKLINEKKEDGKVFWQNLAGYKRQEALRPYLSSPEDRKKGKKFARYQLGDLLLHLEKKHGEDWGKVYDEAWERIDKKVEGLSKHIKLEEERRSEDAQSKAALTDWLRAKASFVIEGLKEADKDEFCRCELKLQKWYGDLRGKPFAIEAENSILDISGFSKQYNCAFIWQKDGVKKLNLYLIINYFKGGKLRFKKIKPEAFEANRFYTVINKKSGEIVPMEVNFNFDDPNLIILPLAFGKRQGREFIWNDLLSLETGSLKLANGRVIEKTLYNRRTRQDEPALFVALTFERREVLDSSNIKPMNLIGVDRGENIPAVIALTDPEGCPLSRFKDSLGNPTHILRIGESYKEKQRTIQAKKEVEQRRAGGYSRKYASKAKNLANDMVRNTARDLLYYAVTQDAMLIFENLSRGFGRQGKRTFMAERQYTRMEDWLTAKLAYEGLSKTYLSKTLAQYTSKTCSNCGFTITSADYDRVLEKLKKTATGWMTTINGKELKVEGQITYYNRRKRQNVVKDLSVELDRLSEESVNNDISSWTKGRSGEALSLLKKRFSHRPVQEKFVCLNCGFETHADEQAALNIARSWLFLRSQEYKKYQTNKTTGNTDKRAFVETWQSFYRKKLKEVWKPAV

SEQ ID NO: 175 - protein, 977 aa, synthetic construct
QEIKRINKIRRRLVKDSNTKKAGKTGPMKTLLVRVMTPDLRERLENLRKKPENIPQPISNTSRANLNKLLTDYTEMKKAILHVYWEEFQKDPVGLMSRVAQPASKKIDQNKLKPEMDEKGNLTTAGFACSQCGQPLFVYKLEQVSEKGKAYTNYFGRCNVAEHEKLILLAQLKPEKDSDEAVTYSLGKFGQRALDFYSIHVTKESTHPVKPLAQIAGNRYASGPVGKALSDACMGTIASFLSKYQDIIIEHQKVVKGNQKRLESLRELAGKENLEYPSVTLPPQPHTKEGVDAYNEVIARVRMWVNLNLWQKLKLSRDDAKPLLRLKGFPSFPLVERQANEVDWWDMVCNVKKLINEKKEDGKVFWQNLAGYKRQEALRPYLSSPEDRKKGKKFARYQLGDLLLHLEKKHGEDWGKVYDEAWERIDKKVEGLSKHIKLEEERRSEDAQSKAALTDWLRAKASFVIEGLKEADKDEFCRCELKLQKWYGDLRGKPFAIEAENSILDISGFSKQYNCAFIWQKDGVKKLNLYLIINYFKGGKLRFKKIKPEAFEANRFYTVINKKSGEIVPMEVNFNFDDPNLIILPLAFGKRQGREFIWNDLLSLETGSLKLANGRVIEKPLYNRRTRQDEPALFVALTFERREVLDSSNIKPMNLIGVDRGENIPAVIALTDPEGCPLSRFKDSLGNPTHILRIGESYKEKQRTIQAKKEVEQRRAGGYSRKYASKAKNLADDMVRNTARDLLYYAVTQDAMLIFENLSRGFGRQGKRTFMAERQYTRMEDWLTAKLAYEGLSKTYLSKTLAQYTSKTCSNCGFTITSADYDRVLEKLKKTATGWMTTINGKELKVEGQITYYNRRKRQNVVKDLSVELDRLSEESVNNDISSWTKGRSGEALSLLKKRFSHRPVQEKFVCLNCGFETHADEQAALNIARSWLFLRSQEYKKYQTNKTTGNTDKRAFVETWQSFYRKKLKEVWKPAV

SEQ ID NO: 176 - protein, 978 aa, synthetic construct
QEIKRINKIRRRLVKDSNTKKAGKTGPMKTLLVRVMTPDLRERLENLRKKPENIPQPISNTSRANLNKLLTDYTEMKKAILHVYWEEFQKDPVGLMSRVAQPASKKIDQNKLKPEMDEKGNLTTAGFACSQCGQPLFVYKLEQVSEKGKAYTNYFGRCNVAEHEKLILLAQLKPEKDSDEAVTYSLGKFGQRALDFYSIHVTKESTHPVKPLAQIAGNRYASGPVGKALSDACMGTIASFLSKYQDIIIEHQKVVKGNQKRLESLRELAGKENLEYPSVTLPPQPHTKEGVDAYNEVIARVRMWVNLNLWQKLKLSRDDAKPLLRLKGFPSFPLVERQANEVDWWDMVCNVKKLINEKKEDGKVFWQNLAGYKRQEALRPYLSSEEDRKKGKKFARYQLGDLLLHLEKKHGEDWGKVYDEAWERIDKKVEGLSKHIKLEEERRSEDAQSKAALTDWLRAKASFVIEGLKEADKDEFCRCELKLQKWYGDLRGKPFAIEAENSILDISGFSKQYNCAFIWQKDGVKKLNLYLIINYFKGGKLRFKKIKPEAFEANRFYTVINKKSGEIVPMEVNFNFDDPNLIILPLAFGKRQGREFIWNDLLSLETGSLKLANGRVIEKTLYNRRTRQDEPALFVALTFEDREVLDSSNIKPMNLIGVDRGENIPAVIALTDPEGCPLSRFKDSLGNPTHILRIGESYKEKQRTIQAKKEVEQRRAGGYSRKYASKAKNLADDMVRNTARDLLYYAVTQDAMLIFENLSRGFGRQGKRTFMAERQYTRMEDWLTAKLAYEGLPSKTYLSKTLAQYTSKTCSNCGFTITSADYDRVLEKLKKTATGWMTTINGKELKVEGQITYYNRYKRQNVVKDLSVELDRLSEESVNNDISSWTKGRSGEALSLLKKRFSHRPVQEKFVCLNCGFETHADEQAALNIARSWLFLRSQEYKKYQTNKTTGNTDKRAFVETWQSFYRKKLKEVWKPAV

SEQ ID NO: 177 - protein, 979 aa, synthetic construct
QEIKRINKIRRRLVKDSNTKKAGKTGPMKTLLVRVMTPDLRERLENLRKKPENIPQPISNTSRANLNKLLTDYTEMKKAILHVYWEEFQKDPVGLMSRVAQPASKKIDQNKLKPEMDEKGNLTTAGFACSQCGQPLFVYKLEQVSEKGKAYTNYFGRCNVAEHEKLILLAQLKPEKDSDEAVTYSLGKFGQRALDFYSIHVTKESTHPVKPLAQIAGNRYASGPVGKALSDACMGTIASFLSKYQDIIIEHQKVVKGNQKRLESLRELAGKENLEYPSVTLPPQPHTKEGVDAYNEVIARVRMWVNLNLWQKLKLSRDDAKPLLRLKGFPSFPLVERQANEVDWWDMVCNVKKLINEKKEDGKVFWQNLAGYKRQEALRPYLSSEEDRKKGKKFARYQLGDLLLHLEKKHGEDWGKVYDEAWERIDKKVEGLSKHIKLEEERRSEDAQSKAALTDWLRAKASFVIEGLKEADKDEFCRCELKLQKWYGDLRGKHPFAIEAENSILDISGFSKQYNCAFIWQKDGVKKLNLYLIINYFKGGKLRFKKIKPEAFEANRFYTVINKKSGEIVPMEVNFNFDDPNLIILPLAFGKRQGREFIWNDLLSLETGSLKLANGRVIEKTLYNRRTRQDEPALFVALTFERREVLDSSNIKPMNLIGVDRGENIPAVIALTDPEGCPLSRFKDSLGNPTHILRIGESYKEKQRTIQAKKEVEQRRAGGYSRKYASKAKNLADDMVRNTARDLLYYAVTQDAMLIFENLSRGFGRQGKRTFMAERQYTRMEDWLTAKLAYEGLPSKTYLSKTLAQYTSKTCSNCGFTITSADYDRVLEKLKKTATGWMTTINGKELKVEGQITYYNRYKRQNVVKDLSVELDRLSEESVNNDISSWTKGRSGEALSLLKKRFSHRPVQEKFVCLNCGFETHADEQAALNIARSWLFLRSQEYKKYQTNKTTGNTDKRAFVETWQSFYRKKLKEVWKPAV

SEQ ID NO: 178 - protein, 979 aa, synthetic construct
QEIKRINKIRRRLVKDSNTKKAGKTGPMKTLLVRVMTPDLRERLENLRKKPENIPQPISNTSRANLNKLLTDYTEMKKAILHVYWEEFQKDPVGLMSRVAQPASKKIDQNKLKPEMDEKGNLTTAGFACSQCGQPLFVYKLEQVSEKGKAYTNYFGRCNVAEHEKLILLAQLKPEKDSDEAVTYSLGKFGQRALDFYSIHVTKESTHPVKPLAQIAGNRYASGPVGKALSDACMGTIASFLSKYQDIIIEHQKVVKGNQKRLESLRELAGKENLEYPSVTLPPQPHTKEGVDAYNEVIARVRMWVNLNLWQKLKLSRDDAKPLLRLKGFPSFPLVERQANEVDWWDMVCNVKKLIINEKKEDGKVFWQNLAGYKRQEALRPYLSSEEDRKKGKKFARYQLGDLLLHLEKKHGEDWGKVYDEAWERIDKKVEGLSKHIKLEEERRSEDAQSKAALTDWLRAKASFVIEGLKEADKDEFCRCELKLQKWYGDLRGKPFAIEAENSILDISGFSKQYNCAFIWQKDGVKKLNLYLIINYFKGGKLRFKKIKPEAFEANRFYTVINKKSGEIVPMEVNFNFDDPNLIILPLAFGKRQGREFIWNDLLSLETGSLKLANGRVIEKTLYNRRTRQDEPALFVALTFERREVLDSSNIKPMNLIGVDRGENIPAVIALTDPEGCPLSRFKDSLGNPTHILRIGESYKEKQRTIQAKKEVEQRRAGGYSRKYASKAKNLADDMVRNTARDLLYYAVTQDAMLIFENLSRGFGRQGKRTFMAERQYTRMEDWLTAKLAYEGLPSKTYLSKTLAQYTSKTCSNCGFTITSADYDRVLEKLKKTATGWMTTINGKELKVEGQITYYNRYKRQNVVKDLSVELDRLSEESVNNDISSWTKGRSGEALSLLKKRFSHRPVQEKFVCLNCGFETHADEQAALNIARSWLFLRSQEYKKYQTNKTTGNTDKRAFVETWQSFYRKKLKEVWKPAV

SEQ ID NO: 179 - protein, 979 aa, synthetic construct
QEIKRINKIRRRLVKDSNTKKAGKTRGPMKTLLVRVMTPDLRERLENLRKKPENIPQPISNTSRANLNKLLTDYTEMKKAILHVYWEEFQKDPVGLMSRVAQPASKKIDQNKLKPEMDEKGNLTTAGFACSQCGQPLFVYKLEQVSEKGKAYTNYFGRCNVAEHEKLILLAQLKPEKDSDEAVTYSLGKFGQRALDFYSIHVTKESTHPVKPLAQIAGNRYASSPVGKALSDACMGTIASFLSKYQDIIIEHQKVVKGNQKRLESLRELAGKENLEYPSVTLPPQPHTKEGVDAYNEVIARVRMWVNLNLWQKLKLSRDDAKPLLRLKGFPSFPLVERQANEVDWWDMVCNVKKLINEKKEDGKVFWQNLAGYKRQEALRPYLSSEEDRKKGKKFARYQLGDLLLHLEKKHGEDWGKVYDEAWERIDKKVEGLSKHIKLEEERRSEDAQSKAALTDWLRAKASFVIEGLKEADKDEFCRCELKLQKWYGDLRGKPFAIEAENSILDISGFSKQYNCAFIWQKDGVKKLNLYLIINYFKGGKLRFKKIKPEAFEANRFYTVINKKSGEIVPMEVNFNFDDPNLIILPLAFGKRQGREFIWNDLLSLETGSLKLANGRVIEKTLYNRRTRQDEPALFVALTFERREVLDSSNIKPMNLIGVDRGENIPAVIALTDPEGCPLSRFKDSLGNPTHILRIGESYKEKQRTIQAKKEVEQRRAGGYSRKYASKAKNLADDMVRNTARDLLYYAVTQDAMLIFENLSRGFGRQGKRTFMAERQYTRMEDWLTAKLAYEGLPSKTYLSKTLAQYTSKTCSNCGFTITSADYDRVLEKLKKTATGWMTTINGKELKVEGQITYYNRYKRQNVVKDLSVELDRLSEESVNNDISSWTKGRSGEALSLLKKRFSHRPVQEKFVCLNCGFETHADEQAALNIARSWLFLRSQEYKKYQTNKTTGNTDKRAFVETWQSFYRKKLKEVWKPAV

SEQ ID NO: 180 - protein, 979 aa, synthetic construct
QEIKRINKIRRRLVKDSNTKKAGKTRGPMKTLLVRVMTPDLRERLENLRKKPENIPQPISNTSRANLNKLLTDYTEMKKAILHVYWEEFQKDPVGLMSRVAQPASKKIDQNKLKPEMDEKGNLTTAGFACSQCGQPLFVYKLEQVSEKGKAYTNYFGRCNVAEHEKLILLAQLKPEKDSDEAVTYSLGKFGQRALDFYSIHVTKESTHPVKPLAQIAGNRYASGPVGKALSGACMGTIASFLSKYQDIIIEHQKVVKGNQKRLESLRELAGKENLEYPSVTLPPQPHTKEGVDAYNEVIARVRMWVNLNLWQKLKLSRDDAKPLLRLKGFPSFPLVERQANEVDWWDMVCNVKKLINEKKEDGKVFWQNLAGYKRQEALRPYLSSEEDRKKGKKFARYQLGDLLLHLEKKHGEDWGKVYDEAWERIDKKVEGLSKHIKLEEERRSEDAQSKAALTDWLRAKASFVIEGLKEADKDEFCRCELKLQKWYGDLRGKPFAIEAENSILDISGFSKQYNCAFIWQKDGVKKLNLYLIINYFKGGKLRFKKIKPEAFEANRFYTVINKKSGEIVPMEVNFNFDDPNLIILPLAFGKRQGREFIWNDLLSLETGSLKLANGRVIEKTLYNRRTRQDEPALFVALTFERREVLDSSNIKPMNLIGVDRGENIPAVIALTDPEGCPLSRFKDSLGNPTHILRIGESYKEKQRTIQAKKEVEQRRAGGYSRKYASKAKNLADDMVRNTARDLLYYAVTQDAMLIFENLSRGFGRQGKRTFMAERQYTRMEDWLTAKLAYEGLPSKTYLSKTLAQYTSKTCSNCGFTITSADYDRVLEKLKKTATGWMTTINGKELKVEGQITYYNRYKRQNVVKDLSVELDRLSEESVNNDISSWTKGRSGEALSLLKKRFSHRPVQEKFVCLNCGFETHADEQAALNIARSWLFLRSQEYKKYQTNKTTGNTDKRAFVETWQSFYRKKLKEVWKPAV

SEQ ID NO: 181 - protein, 979 aa, synthetic construct
QEIKRINKIRRRLVKDSNTKKAGKTRGPMKTLLVRVMTPDLRERLENLRKKPENIPQPISNTSRANLNKLLTDYTEMKKAILHVYWEEFQKDPVGLMSRVAQPASKKIDQNKLKPEMDEKGNLTTAGFACSQCGQPLFVYKLEQVSEKGKAYTNYFGRCNVAEHEKLILLAQLKPEKDSDEAVTYSLGKFGQRALDFYSIHVTKESTHPVKPLAQIAGNRYASSPVGKALSGACMGTIASFLSKYQDIIIEHQKVVKGNQKRLESLRELAGKENLEYPSVTLPPQPHTKEGVDAYNEVIARVRMWVNLNLWQKLKLSRDDAKPLLRLKGFPSFPLVERQANEVDWWDMVCNVKKLINEKKEDGKVFWQNLAGYKRQEALRPYLSSEEDRKKGKKFARYQLGDLLLHLEKKHGEDWGKVYDEAWERIDKKVEGLSKHIKLEEERRSEDAQSKAALTDWLRAKASFVIEGLKEADKDEFCRCELKLQKWYGDLRGKPFAIEAENSILDISGFSKQYNCAFIWQKDGVKKLNLYLIINYFKGGKLRFKKIKPEAFEANRFYTVINKKSGEIVPMEVNFNFDDPNLIILPLAFGKRQGREFIWNDLLSLETGSLKLANGRVIEKTLYNRRTRQDEPALFVALTFERREVLDSSNIKPMNLIGVDRGENIPAVIALTDPEGCPLSRFKDSLGNPTHILRIGESYKEKQRTIQAKKEVEQRRAGGYSRKYASKAKNLADDMVRNTARDLLYYAVTQDAMLIFENLSRGFGRQGKRTFMAERQYTRMEDWLTAKLAYEGLPSKTYLSKTLAQYTSKTCSNCGFTITSADYDRVLEKLKKTATGWMTTINGKELKVEGQITYYNRYKRQNVVKDLSVELDRLSEESVNNDISSWTKGRSGEALSLLKKRFSHRPVQEKFVCLNCGFETHADEQAALNIARSWLFLRSQEYKKYQTNKTTGNTDKRAFVETWQSFYRKKLKEVWKPAV

SEQ ID NO: 182 - protein, 978 aa, synthetic construct
QEIKRINKIRRRLVKDSNTKKAGKTGPMKTLLVRVMTPDLRERLENLRKKPENIPQPISNTSRANLNKLLTDYTEMKKAILHVYWEEFQKDPVGLMSRVAQPASKKIDQNKLKPEMDEKGNLTTAGFACSQCGQPLFVYKLEQVSEKGKAYTNYFGRCNVAEHEKLILLAQLKPEKDSDEAVTYSLGKFGQRALDFYSIHVTKESTHPVKPLAQIAGNRYASGPVGKALSDACMGTIASFLSKYQDIIIEHQKVVKGNQKRLESLRELAGKENLEYPSVTLPPQPHTKEGVDAYNEVIARVRMWVNLNLWQKLKLSRDDAKPLLRLKGFPSFPLVERQANEVDWWDMVCNVKKLINEKKEDGKVFWQNLAGYKRQEALRPYLSSPEDRKKGKKFARYQFGDLLLHLEKKHGEDWGKVYDEAWERIDKKVEGLSKHIKLEEERRSEDAQSKAALTDWLRAKASFVIEGLKEADKDEFCRCELKLQKWYGDLRGKPFAIEAENSILDISGFSKQYNCAFIWQKDGVKKLNLYLIINYFKGGKLRFKKIKPEAFEANRFYTVINKKSGEIVPMEVNFNFDDPNLIILPLAFGKRQGREFIWNDLLSLETGSLKLANGRVIEKTLYNRRTRQDEPALFVALTFERREVLDSSNIKPMNLIGVDRGENIPAVIALTDPEGCPLSRFKDSLGNPTHILRIGESYKEKQRTIQAKKEVEQRRAGGYSRKYASKAKNLANDMVRNTARDLLYYAVTQDAMLIFENLSRGFGRQGKRTFMAERQYTRMEDWLTAKLAYEGLPSKTYLSKTLAQYTSKTCSNCGFTITSADYDRVLEKLKKTATGWMTTINGKELKVEGQITYYNRRKRQNVVKDLSVELDRLSEESVNNDISSWTKGRSGEALSLLKKRFSHRPVQEKFVCLNCGFETHADEQAALNIARSWLFLRSQEYKKYQTNKTTGNTDKRAFVETWQSFYRKKLKEVWKPAV

SEQ ID NO: 183 - protein, 978 aa, synthetic construct
QEIKRINKIRRRLVKDSNTKKAGKTGPMKTLLVRVMTPDLRERLENLRKKPENIPQPISNTSRANLNKLLTDYTEMKKAILHVYWEEFQKDPVGLMSRVAQPASKKIDQNKLKPEMDEKGNLTTAGFACSQCGQPLFVYKLEQVSEKGKAYTNYFGRCNVAEHEKLIKLAQLKPEKDSDEAVTYSLGKFGQRALDFYSIHVTKESTHPVKPLAQIAGNRYASSPVGKALSDACMGTIASFLSKYQDIIIEHQKVVKGNQKRLESLRELAGKENLEYPSVTLPPQPHTKEGVDAYNEVIARVRMWVNLNLWQKLKLSRDDAKPLLRLKGFPSFPLVERQANEVDWWDMVCNVKKLINEKKEDGKVFWQNLAGYKRQEALRPYLSSEEDRKKGKKFARYQLGDLLLHLEKKHGEDWGKVYDEAWERIDKKVEGLSKHIKLEEERRSEDAQSKAALTDWLRAKASFVIEGLKEADKDEFCRCELKLQKWYGDLRGKPFAIEAENSILDISGFSKQYNCAFIWQKDGVKKLNLYLIINYFKGGKLRFKKIKPEAFEANRFYTVINKKSGEIVPMEVNFNFDDPNLIILPLAFGKRQGREFIWNDLLSLETGSLKLANGRVIEKTLYNRRTRQDEPALFVALTFERREVLDSSNIKPMNLIGVDRGENIPAVIALTDPEGCPLSRFKDSLGNPTHILRIGESYKEKQRTIQAKKEVEQRRAGGYSRKYASKAKNLADDMVRNTARDLLYYAVTQDAMLIFENLSRGFGRQGKRTFMAERQYTRMEDWLTAKLAYEGLPSKTYLSKTLAQYTSKTCSNCGFTITSADYDRVLEKLKKTATGWMTTINGKELKVEGQITYYNRYKRQNVVKDLSVELDRLSEESVNNDISSWTKGRSGEALSLLKKRFSHRPVQEKFVCLNCGFETHADEQAALNIARSWLFLRSQEYKKYQTNKTTGNTDKRAFVETWQSFYRKKLKEVWKPAV

SEQ ID NO: 184 - protein, 978 aa, synthetic construct
QEIKRINKIRRRLVKDSNTKKAGKTGPMKTLLVRVMTPDLRERLENLRKKPENIPQPISNTSRANLNKLLTDYTEMKKAILHVYWEEFQKDPVGLMSRVAQPASKKIDQNKLKPEMDEKGNLTTAGFACSQCGQPLFVYKLEQVSEKGKAYTNYFGRCNVAEHEKLILLAQLKPEKDSDEAVTYSLGKFGQRALDFYSIHVTKESTHPVKPLAQIAGNRYASSPVGKALSGACMGTIASFLSKYQDIIIEHQKVVKGNQKRLESLRELAGKENLEYPSVTLPPQPHTKEGVDAYNEVIARVRMWVNLNLWQKLKLSRDDAKPLLRLKGFPSFPLVERQANEVDWWDMVCNVKKLINEKKEDGKVFWQNLAGYKRQEALRPYLSSEEDRKKGKKFARYQLGDLLLHLEKKHGEDWGKVYDEAWERIDKKVEGLSKHIKLEEERRSEDAQSKAALTDWLRAKASFVIEGLKEADKDEFCRCELKLQKWYGDLRGKPFAIEAENSILDISGFSKQYNCAFIWQKDGVKKLNLYLIINYFKGGKLRFKKIKPEAFEANRFYTVINKKSGEIVPMEVNFNFDDPNLIILPLAFGKRQGREFIWNDLLSLETGSLKLANGRVIEKTLYNRRTRQDEPALFVALTFERREVLDSSNIKPMNLIGVDRGENIPAVIALTDPEGCPLSRFKDSLGNPTHILRIGESYKEKQRTIQAKKEVEQRRAGGYSRKYASKAKNLADDMVRNTARDLLYYAVTQDAMLIFENLSRGFGRQGKRTFMAERQYTRMEDWLTAKLAYEGLPSKTYLSKTLAQYTSKTCSNCGFTITSADYDRVLEKLKKTATGWMTTINGKELKVEGQITYYNRYKRQNVVKDLSVELDRLSEESVNNDISSWTKGRSGEALSLLKKRFSHRPVQEKFVCLNCGFETHADEQAALNIARSWLFLRSQEYKKYQTNKTTGNTDKRAFVETWQSFYRKKLKEVWKPAV

SEQ ID NO: 185 - protein, 978 aa, synthetic construct
QEIKRINKIRRRLVKDSNTKKAGKTGPMKTLLVRVMTPDLRERLENLRKKPENIPQPISNTSRANLNKLLTDYTEMKKAILHVYWEEFQKDPVGLMSRVAQPASKKIDQNKLKPEMDEKGNLTTAGFACSQCGQPLFVYKLEQVSEKGKAYTNYFGRCNVAEHEKLIKLAQLKPEKDSDEAVTYSLGKFGQRALDFYSIHVTKESTHPVKPLAQIAGNRYASSPVGKALSGACMGTIASFLSKYQDIIIEHQKVVKGNQKRLESLRELAGKENLEYPSVTLPPQPHTKEGVDAYNEVIARVRMWVNLNLWQKLKLSRDDAKPLLRLKGFPSFPLVERQANEVDWWDMVCNVKKLINEKKEDGKVFWQNLAGYKRQEALRPYLSSEEDRKKGKKFARYQLGDLLLHLEKKHGEDWGKVYDEAWERIDKKVEGLSKHIKLEEERRSEDAQSKAALTDWLRAKASFVIEGLKEADKDEFCRCELKLQKWYGDLRGKPFAIEAENSILDISGFSKQYNCAFIWQKDGVKKLNLYLIINYFKGGKLRFKKIKPEAFEANRFYTVINKKSGEIVPMEVNFNFDDPNLIILPLAFGKRQGREFIWNDLLSLETGSLKLANGRVIEKTLYNRRTRQDEPALFVALTFERREVLDSSNIKPMNLIGVDRGENIPAVIALTDPEGCPLSRFKDSLGNPTHILRIGESYKEKQRTIQAKKEVEQRRAGGYSRKYASKAKNLADDMVRNTARDLLYYAVTQDAMLIFENLSRGFGRQGKRTFMAERQYTRMEDWLTAKLAYEGLPSKTYLSKTLAQYTSKTCSNCGFTITSADYDRVLEKLKKTATGWMTTINGKELKVEGQITYYNRYKRQNVVKDLSVELDRLSEESVNNDISSWTKGRSGEALSLLKKRFSHRPVQEKFVCLNCGFETHADEQAALNIARSWLFLRSQEYKKYQTNKTTGNTDKRAFVETWQSFYRKKLKEVWKPAV

SEQ ID NO: 186 - protein, 978 aa, synthetic construct
QEIKRINKIRRRLVKDSNTKKAGKTRGPMKTLLVRVMTPDLRERLENLRKKPENIPQPISNTSRANLNKLLTDYTEMKKAILHVYWEEFQKDPVGLMSRVAQPASKKIDQNKLKPEMDEKGNLTTAGFACSQCGQPLFVYKLEQVSEKGKAYTNYFGRCNVAEHEKLIKLAQLKPEKDSDEAVTYSLGKFGQRALDFYSIHVTKESTHPVKPLAQIAGNRYASGPVGKALSDACMGTIASFLSKYQDIIIEHQKVVKGNQKRLESLRELAGKENLEYPSVTLPPQPHTKEGVDAYNEVIARVRMWVNLNLWQKLKLSRDDAKPLLRLKGFPSFPLVERQANEVDWWDMVCNVKKLINEKKEDGKVFWQNLAGYKRQEALRPYLSSEEDRKKGKKFARYQLGDLLLHLEKKHGEDWGKVYDEAWERIDKKVEGLSKHIKLEEERRSEDAQSKAALTDWLRAKASFVIEGLKEADKDEFCRCELKLQKWYGDLRGKPFAIEAENSILDISGFSKQYNCAFIWQKDGVKKLNLYLIINYFKGGKLRFKKIKPEAFEANRFYTVINKKSGEIVPMEVNFNFDDPNLIILPLAFGKRQGREFIWNDLLSLETGSLKLANGRVIEKTLYNRRTRQDEPALFVALTFERREVLDSSNIKPMNLIGVDRGENIPAVIALTDPEGCPLSRFKDSLGNPTHILRIGESYKEKQRTIQAKKEVEQRRAGGYSRKYASKAKNLADDMVRNTARDLLYYAVTQDAMLIFENLSRGFGRQGKRTFMAERQYTRMEDWLTAKLAYEGLSKTYLSKTLAQYTSKTCSNCGFTITSADYDRVLEKLKKTATGWMTTINGKELKVEGQITYYNRYKRQNVVKDLSVELDRLSEESVNNDISSWTKGRSGEALSLLKKRFSHRPVQEKFVCLNCGFETHADEQAALNIARSWLFLRSQEYKKYQTNKTTGNTDKRAFVETWQSFYRKKLKEVWKPAV

SEQ ID NO: 187 - protein, 979 aa, synthetic construct
QEIKRINKIRRRLVKDSNTKKAGKTRGPMKTLLVRVMTPDLRERLENLRKKPENIPQPISNTSRANLNKLLTDYTEMKKAILHVYWEEFQKDPVGLMSRVAQPASKKIDQNKLKPEMDEKGNLTTAGFACSQCGQPLFVYKLEQVSEKGKAYTNYFGRCNVAEHEKLIKLAQLKPEKDSDEAVTYSLGKFGQRALDFYSIHVTKESTHPVKPLAQIAGNRYASSPVGKALSGACMGTIASFLSKYQDIIIEHQKVVKGNQKRLESLRELAGKENLEYPSVTLPPQPHTKEGVDAYNEVIARVRMWVNLNLWQKLKLSRDDAKPLLRLKGFPSFPLVERQANEVDWWDMVCNVKKLINEKKEDGKVFWQNLAGYKRQEALRPYLSSEEDRKKGKKFARYQLGDLLLHLEKKHGEDWGKVYDEAWERIDKKVEGLSKHIKLEEERRSEDAQSKAALTDWLRAKASFVIEGLKEADKDEFCRCELKLQKWYGDLRGKPFAIEAENSILDISGFSKQYNCAFIWQKDGVKKLNLYLIINYFKGGKLRFKKIKPEAFEANRFYTVINKKSGEIVPMEVNFNFDDPNLIILPLAFGKRQGREFIWNDLLSLETGSLKLANGRVIEKTLYNRRTRQDEPALFVALTFERREVLDSSNIKPMNLIGVDRGENIPAVIALTDPEGCPLSRFKDSLGNPTHILRIGESYKEKQRTIQAKKEVEQRRAGGYSRKYASKAKNLADDMVRNTARDLLYYAVTQDAMLIFENLSRGFGRQGKRTFMAERQYTRMEDWLTAKLAYEGLPSKTYLSKTLAQYTSKTCSNCGFTITSADYDRVLEKLKKTATGWMTTINGKELKVEGQITYYNRYKRQNVVKDLSVELDRLSEESVNNDISSWTKGRSGEALSLLKKRFSHRPVQEKFVCLNCGFETHADEQAALNIARSWLFLRSQEYKKYQTNKTTGNTDKRAFVETWQSFYRKKLKEVWKPAV

SEQ ID NO: 188 - protein, 978 aa, synthetic construct
QEIKRINKIRRRLVKDSNTKKAGKTGPMKTLLVRVMTPDLRERLENLRKKPENIPQPISNTSRANLNKLLTDYTEMKKAILHVYWEEFQKDPVGLMSRVAQPASKKIDQNKLKPEMDEKGNLTTAGFACSQCGQPLFVYKLEQVSEKGKAYTNYFGRCNVAEHEKLILLAQLKPEKDSDEAVTYSLGKFGQRALDFYSIHVTKESTHPVKPLAQIAGNRYASYPVGKALSGACMGTIASFLSKYQDIIIEHQKVVKGNQKRLESLRELAGKENLEYPSVTLPPQPHTKEGVDAYNEVIARVRMWVNLNLWQKLKLSRDDAKPLLRLKGFPSFPLVERQANEVDWWDMVCNVKKLINEKKEDGKVFWQNLAGYKRQEALRPYLSSEEDRKKGKKFARYQLGDLLLHLEKKHGEDWGKVYDEAWERIDKKVEGLSKHIKLEEERRSEDAQSKAALTDWLRAKASFVIEGLKEADKDEFCRCELKLQKWYGDLRGKPFAIEAENSILDISGFSKQYNCAFIWQKDGVKKLNLYLIINYFKGGKLRFKKIKPEAFEANRFYTVINKKSGEIVPMEVNFNFDDPNLIILPLAFGKRQGREFIWNDLLSLETGSLKLANGRVIEKTLYNRRTRQDEPALFVALTFERREVLDSSNIKPMNLIGVDRGENIPAVIALTDPEGCPLSRFKDSLGNPTHILRIGESYKEKQRTIQAKKEVEQRRAGGYSRKYASKAKNLADDMVRNTARDLLYYAVTQDAMLIFENLSRGFGRQGKRTFMAERQYTRMEDWLTAKLAYEGLPSKTYLSKTLAQYTSKTCSNCGFTITSADYDRVLEKLKKTATGWMTTINGKELKVEGQITYYNRYKRQNVVKDLSVELDRLSEESVNNDISSWTKGRSGEALSLLKKRFSHRPVQEKFVCLNCGFETHADEQAALNIARSWLFLRSQEYKKYQTNKTTGNTDKRAFVETWQSFYRKKLKEVWKPAV

SEQ ID NO: 189 - protein, 978 aa, synthetic construct
QEIKRINKIRRRLVKDSNTKKAGKTGPMKTLLVRVMTPDLRERLENLRKKPENIPQPISNTSRANLNKLLTDYTEMKKAILHVYWEEFQKDPVGLMSRVAQPASKKIDQNKLKPEMDEKGNLTTAGFACSQCGQPLFVYKLEQVSEKGKAYTNYFGRCNVAEHEKLILLAQLKPEKDSDEAVTYSLGKFGQRALDFYSIHVTKESTHPVKPLAQIAGNRYASHPVGKALSGACMGTIASFLSKYQDIIIEHQKVVKGNQKRLESLRELAGKENLEYPSVTLPPQPHTKEGVDAYNEVIARVRMWVNLNLWQKLKLSRDDAKPLLRLKGFPSFPLVERQANEVDWWDMVCNVKKLINEKKEDGKVFWQNLAGYKRQEALRPYLSSEEDRKKGKKFARYQLGDLLLHLEKKHGEDWGKVYDEAWERIDKKVEGLSKHIKLEEERRSEDAQSKAALTDWLRAKASFVIEGLKEADKDEFCRCELKLQKWYGDLRGKPFAIEAENSILDISGFSKQYNCAFIWQKDGVKKLNLYLIINYFKGGKLRFKKIKPEAFEANRFYTVINKKSGEIVPMEVNFNFDDPNLIILPLAFGKRQGREFIWNDLLSLETGSLKLANGRVIEKTLYNRRTRQDEPALFVALTFERREVLDSSNIKPMNLIGVDRGENIPAVIALTDPEGCPLSRFKDSLGNPTHILRIGESYKEKQRTIQAKKEVEQRRAGGYSRKYASKAKNLADDMVRNTARDLLYYAVTQDAMLIFENLSRGFGRQGKRTFMAERQYTRMEDWLTAKLAYEGLPSKTYLSKTLAQYTSKTCSNCGFTITSADYDRVLEKLKKTATGWMTTINGKELKVEGQITYYNRYKRQNVVKDLSVELDRLSEESVNNDISSWTKGRSGEALSLLKKRFSHRPVQEKFVCLNCGFETHADEQAALNIARSWLFLRSQEYKKYQTNKTTGNTDKRAFVETWQSFYRKKLKEVWKPAV

SEQ ID NO: 190 - protein, 979 aa, synthetic construct
QEIKRINKIRRRLVKDSNTKKAGKTRGPMKTLLVRVMTPDLRERLENLRKKPENIPQPISNTSRANLNKLLTDYTEMKKAILHVYWEEFQKDPVGLMSRVAQPASKKIDQNKLKPEMDEKGNLTTAGFACSQCGQPLFVYKLEQVSEKGKAYTNYFGRCNVAEHEKLILLAQLKPEKDSDEAVTYSLGKFGQRALDFYSIHVTKESTHPVKPLAQIAGNRYASYPVGKALSGACMGTIASFLSKYQDIIIEHQKVVKGNQKRLESLRELAGKENLEYPSVTLPPQPHTKEGVDAYNEVIARVRMWVNLNLWQKLKLSRDDAKPLLRLKGFPSFPLVERQANEVDWWDMVCNVKKLINEKKEDGKVFWQNLAGYKRQEALRPYLSSEEDRKKGKKFARYQLGDLLLHLEKKHGEDWGKVYDEAWERIDKKVEGLSKHIKLEEERRSEDAQSKAALTDWLRAKASFVIEGLKEADKDEFCRCELKLQKWYGDLRGKPFAIEAENSILDISGFSKQYNCAFIWQKDGVKKLNLYLIINYFKGGKLRFKKIKPEAFEANRFYTVINKKSGEIVPMEVNFNFDDPNLIILPLAFGKRQGREFIWNDLLSLETGSLKLANGRVIEKTLYNRRTRQDEPALFVALTFERREVLDSSNIKPMNLIGVDRGENIPAVIALTDPEGCPLSRFKDSLGNPTHILRIGESYKEKQRTIQAKKEVEQRRAGGYSRKYASKAKNLADDMVRNTARDLLYYAVTQDAMLIFENLSRGFGRQGKRTFMAERQYTRMEDWLTAKLAYEGLPSKTYLSKTLAQYTSKTCSNCGFTITSADYDRVLEKLKKTATGWMTTINGKELKVEGQITYYNRYKRQNVVKDLSVELDRLSEESVNNDISSWTKGRSGEALSLLKKRFSHRPVQEKFVCLNCGFETHADEQAALNIARSWLFLRSQEYKKYQTNKTTGNTDKRAFVETWQSFYRKKLKEVWKPAV

SEQ ID NO: 191 - protein, 979 aa, synthetic construct
QEIKRINKIRRRLVKDSNTKKAGKTRGPMKTLLVRVMTPDLRERLENLRKKPENIPQPISNTSRANLNKLLTDYTEMKKAILHVYWEEFQKDPVGLMSRVAQPASKKIDQNKLKPEMDEKGNLTTAGFACSQCGQPLFVYKLEQVSEKGKAYTNYFGRCNVAEHEKLILLAQLKPEKDSDEAVTYSLGKFGQRALDFYSIHVTKESTHPVKPLAQIAGNRYASHPVGKALSGACMGTIASFLSKYQDIIIEHQKVVKGNQKRLESLRELAGKENLEYPSVTLPPQPHTKEGVDAYNEVIARVRMWVNLNLWQKLKLSRDDAKPLLRLKGFPSFPLVERQANEVDWWDMVCNVKKLINEKKEDGKVFWQNLAGYKRQEALRPYLSSEEDRKKGKKFARYQLGDLLLHLEKKHGEDWGKVYDEAWERIDKKVEGLSKHIKLEEERRSEDAQSKAALTDWLRAKASFVIEGLKEADKDEFCRCELKLQKWYGDLRGKPFAIEAENSILDISGFSKQYNCAFIWQKDGVKKLNLYLIINYFKGGKLRFKKIKPEAFEANRFYTVINKKSGEIVPMEVNFNFDDPNLIILPLAFGKRQGREFIWNDLLSLETGSLKLANGRVIEKTLYNRRTRQDEPALFVALTFERREVLDSSNIKPMNLIGVDRGENIPAVIALTDPEGCPLSRFKDSLGNPTHILRIGESYKEKQRTIQAKKEVEQRRAGGYSRKYASKAKNLADDMVRNTARDLLYYAVTQDAMLIFENLSRGFGRQGKRTFMAERQYTRMEDWLTAKLAYEGLPSKTYLSKTLAQYTSKTCSNCGFTITSADYDRVLEKLKKTATGWMTTINGKELKVEGQITYYNRYKRQNVVKDLSVELDRLSEESVNNDISSWTKGRSGEALSLLKKRFSHRPVQEKFVCLNCGFETHADEQAALNIARSWLFLRSQEYKKYQTNKTTGNTDKRAFVETWQSFYRKKLKEVWKPAV

SEQ ID NO: 192 - protein, 978 aa, synthetic construct
QEIKRINKIRRRLVKDSNTKKAGKTGPMKTLLVRVMTPDLRERLENLRKKPENIPQPISNTSRANLNKLLTDYTEMKKAILHVYWEEFQKDPVGLMSRVAQPASKKIDQNKLKPEMDEKGNLTTAGFACSQCGQPLFVYKLEQVSEKGKAYTNYFGRCNVAEHEKLIKLAQLKPEKDSDEAVTYSLGKFGQRALDFYSIHVTKESTHPVKPLAQIAGNRYASGPVGKALSGACMGTIASFLSKYQDIIIEHQKVVKGNQKRLESLRELAGKENLEYPSVTLPPQPHTKEGVDAYNEVIARVRMWVNLNLWQKLKLSRDDAKPLLRLKGFPSFPLVERQANEVDWWDMVCNVKKLINEKKEDGKVFWQNLAGYKRQEALRPYLSSEEDRKKGKKFARYQLGDLLLHLEKKHGEDWGKVYDEAWERIDKKVEGLSKHIKLEEERRSEDAQSKAALTDWLRAKASFVIEGLKEADKDEFCRCELKLQKWYGDLRGKPFAIEAENSILDISGFSKQYNCAFIWQKDGVKKLNLYLIINYFKGGKLRFKKIKPEAFEANRFYTVINKKSGEIVPMEVNFNFDDPNLIILPLAFGKRQGREFIWNDLLSLETGSLKLANGRVIEKTLYNRRTRQDEPALFVALTFERREVLDSSNIKPMNLIGVDRGENIPAVIALTDPEGCPLSRFKDSLGNPTHILRIGESYKEKQRTIQAKKEVEQRRAGGYSRKYASKAKNLADDMVRNTARDLLYYAVTQDAMLIFENLSRGFGRQGKRTFMAERQYTRMEDWLTAKLAYEGLPSKTYLSKTLAQYTSKTCSNCGFTITSADYDRVLEKLKKTATGWMTTINGKELKVEGQITYYNRYKRQNVVKDLSVELDRLSEESVNNDISSWTKGRSGEALSLLKKRFSHRPVQEKFVCLNCGFETHADEQAALNIARSWLFLRSQEYKKYQTNKTTGNTDKRAFVETWQSFYRKKLKEVWKPAV

SEQ ID NO: 193 - protein, 978 aa, synthetic construct
QEIKRINKIRRRLVKDSNTKKAGKTGPMKTLLVRVMTPDLRERLENLRKKPENIPQPISNTSRANLNKLLTDYTEMKKAILHVYWEEFQKDPVGLMSRVAQPASKKIDQNKLKPEMDEKGNLTTAGFACSQCGQPLFVYKLEQVSEKGKAYTNYFGRCNVAEHEKLIKLAQLKPEKDSDEAVTYSLGKFGQRALDFYSIHVTKESTHPVKPLAQIAGNRYASYPVGKALSGACMGTIASFLSKYQDIIIEHQKVVKGNQKRLESLRELAGKENLEYPSVTLPPQPHTKEGVDAYNEVIARVRMWVNLNLWQKLKLSRDDAKPLLRLKGFPSFPLVERQANEVDWWDMVCNVKKLINEKKEDGKVFWQNLAGYKRQEALRPYLSSEEDRKKGKKFARYQLGDLLLHLEKKHGEDWGKVYDEAWERIDKKVEGLSKHIKLEEERRSEDAQSKAALTDWLRAKASFVIEGLKEADKDEFCRCELKLQKWYGDLRGKPFAIEAENSILDISGFSKQYNCAFIWQKDGVKKLNLYLIINYFKGGKLRFKKIKPEAFEANRFYTVINKKSGEIVPMEVNFNFDDPNLIILPLAFGKRQGREFIWNDLLSLETGSLKLANGRVIEKTLYNRRTRQDEPALFVALTFERREVLDSSNIKPMNLIGVDRGENIPAVIALTDPEGCPLSRFKDSLGNPTHILRIGESYKEKQRTIQAKKEVEQRRAGGYSRKYASKAKNLADDMVRNTARDLLYYAVTQDAMLIFENLSRGFGRQGKRTFMAERQYTRMEDWLTAKLAYEGLPSKTYLSKTLAQYTSKTCSNCGFTITSADYDRVLEKLKKTATGWMTTINGKELKVEGQITYYNRYKRQNVVKDLSVELDRLSEESVNNDISSWTKGRSGEALSLLKKRFSHRPVQEKFVCLNCGFETHADEQAALNIARSWLFLRSQEYKKYQTNKTTGNTDKRAFVETWQSFYRKKLKEVWKPAV

SEQ ID NO: 194 - protein, 979 aa, synthetic construct
QEIKRINKIRRRLVKDSNTKKAGKTRGPMKTLLVRVMTPDLRERLENLRKKPENIPQPISNTSRANLNKLLTDYTEMKKAILHVYWEEFQKDPVGLMSRVAQPASKKIDQNKLKPEMDEKGNLTTAGFACSQCGQPLFVYKLEQVSEKGKAYTNYFGRCNVAEHEKLIKLAQLKPEKDSDEAVTYSLGKFGQRALDFYSIHVTKESTHPVKPLAQIAGNRYASGPVGKALSGACMGTIASFLSKYQDIIIEHQKVVKGNQKRLESLRELAGKENLEYPSVTLPPQPHTKEGVDAYNEVIARVRMWVNLNLWQKLKLSRDDAKPLLRLKGFPSFPLVERQANEVDWWDMVCNVKKLINEKKEDGKVFWQNLAGYKRQEALRPYLSSEEDRKKGKKFARYQLGDLLLHLEKKHGEDWGKVYDEAWERIDKKVEGLSKHIKLEEERRSEDAQSKAALTDWLRAKASFVIEGLKEADKDEFCRCELKLQKWYGDLRGKPFAIEAENSILDISGFSKQYNCAFIWQKDGVKKLNLYLIINYFKGGKLRFKKIKPEAFEANRFYTVINKKSGEIVPMEVNFNFDDPNLIILPLAFGKRQGREFIWNDLLSLETGSLKLANGRVIEKTLYNRRTRQDEPALFVALTFERREVLDSSNIKPMNLIGVDRGENIPAVIALTDPEGCPLSRFKDSLGNPTHILRIGESYKEKQRTIQAKKEVEQRRAGGYSRKYASKAKNLADDMVRNTARDLLYYAVTQDAMLIFENLSRGFGRQGKRTFMAERQYTRMEDWLTAKLAYEGLPSKTYLSKTLAQYTSKTCSNCGFTITSADYDRVLEKLKKTATGWMTTINGKELKVEGQITYYNRYKRQNVVKDLSVELDRLSEESVNNDISSWTKGRSGEALSLLKKRFSHRPVQEKFVCLNCGFETHADEQAALNIARSWLFLRSQEYKKYQTNKTTGNTDKRAFVETWQSFYRKKLKEVWKPAV

SEQ ID NO: 195 - protein, 979 aa, synthetic construct
QEIKRINKIRRRLVKDSNTKKAGKTRGPMKTLLVRVMTPDLRERLENLRKKPENIPQPISNTSRANLNKLLTDYTEMKKAILHVYWEEFQKDPVGLMSRVAQPASKKIDQNKLKPEMDEKGNLTTAGFACSQCGQPLFVYKLEQVSEKGKAYTNYFGRCNVAEHEKLIKLAQLKPEKDSDEAVTYSLGKFGQRALDFYSIHVTKESTHPVKPLAQIAGNRYASYPVGKALSGACMGTIASFLSKYQDIIIEHQKVVKGNQKRLESLRELAGKENLEYPSVTLPPQPHTKEGVDAYNEVIARVRMWVNLNLWQKLKLSRDDAKPLLRLKGFPSFPLVERQANEVDWWDMVCNVKKLINEKKEDGKVFWQNLAGYKRQEALRPYLSSEEDRKKGKKFARYQLGDLLLHLEKKHGEDWGKVYDEAWERIDKKVEGLSKHIKLEEERRSEDAQSKAALTDWLRAKASFVIEGLKEADKDEFCRCELKLQKWYGDLRGKPFAIEAENSILDISGFSKQYNCAFIWQKDGVKKLNLYLIINYFKGGKLRFKKIKPEAFEANRFYTVINKKSGEIVPMEVNFNFDDPNLIILPLAFGKRQGREFIWNDLLSLETGSLKLANGRVIEKTLYNRRTRQDEPALFVALTFERREVLDSSNIKPMNLIGVDRGENIPAVIALTDPEGCPLSRFKDSLGNPTHILRIGESYKEKQRTIQAKKEVEQRRAGGYSRKYASKAKNLADDMVRNTARDLLYYAVTQDAMLIFENLSRGFGRQGKRTFMAERQYTRMEDWLTAKLAYEGLPSKTYLSKTLAQYTSKTCSNCGFTITSADYDRVLEKLKKTATGWMTTINGKELKVEGQITYYNRYKRQNVVKDLSVELDRLSEESVNNDISSWTKGRSGEALSLLKKRFSHRPVQEKFVCLNCGFETHADEQAALNIARSWLFLRSQEYKKYQTNKTTGNTDKRAFVETWQSFYRKKLKEVWKPAV

SEQ ID NO: 196 - protein, 979 aa, synthetic construct
QEIKRINKIRRRLVKDSNTKKAGKTRGPMKTLLVRVMTPDLRERLENLRKKPENIPQPISNTSRANLNKLLTDYTEMKKAILHVYWEEFQKDPVGLMSRVAQPASKKIDQNKLKPEMDEKGNLTTAGFACSQCGQPLFVYKLEQVSEKGKAYTNYFGRCNVAEHEKLIKLAQLKPEKDSDEAVTYSLGKFGQRALDFYSIHVTKESTHPVKPLAQIAGNRYASHPVGKALSGACMGTIASFLSKYQDIIIEHQKVVKGNQKRLESLRELAGKENLEYPSVTLPPQPHTKEGVDAYNEVIARVRMWVNLNLWQKLKLSRDDAKPLLRLKGFPSFPLVERQANEVDWWDMVCNVKKLINEKKEDGKVFWQNLAGYKRQEALRPYLSSEEDRKKGKKFARYQLGDLLLHLEKKHGEDWGKVYDEAWERIDKKVEGLSKHIKLEEERRSEDAQSKAALTDWLRAKASFVIEGLKEADKDEFCRCELKLQKWYGDLRGKPFAIEAENSILDISGFSKQYNCAFIWQKDGVKKLNLYLIINYFKGGKLRFKKIKPEAFEANRFYTVINKKSGEIVPMEVNFNFDDPNLIILPLAFGKRQGREFIWNDLLSLETGSLKLANGRVIEKTLYNRRTRQDEPALFVALTFERREVLDSSNIKPMNLIGVDRGENIPAVIALTDPEGCPLSRFKDSLGNPTHILRIGESYKEKQRTIQAKKEVEQRRAGGYSRKYASKAKNLADDMVRNTARDLLYYAVTQDAMLIFENLSRGFGRQGKRTFMAERQYTRMEDWLTAKLAYEGLPSKTYLSKTLAQYTSKTCSNCGFTITSADYDRVLEKLKKTATGWMTTINGKELKVEGQITYYNRYKRQNVVKDLSVELDRLSEESVNNDISSWTKGRSGEALSLLKKRFSHRPVQEKFVCLNCGFETHADEQAALNIARSWLFLRSQEYKKYQTNKTTGNTDKRAFVETWQSFYRKKLKEVWKPAV

SEQ ID NO: 197 - protein, 979 aa, synthetic construct
QEIKRINKIRRRLVKDSNTKKAGKTRGPMKTLLVRVMTPDLRERLENLRKKPENIPQPISNTSRANLNKLLTDYTEMKKAILHVYWEEFQKDPVGLMSRVAQPASKKIDQNKLKPEMDEKGNLTTAGFACSQCGQPLFVYKLEQVSEKGKAYTNYFGRCNVAEHEKLILLAQLKPEKDSDEAVTYSLGKFGQRALDFYSIHVTKESTHPVKPLAQIAGNRYASHPVGKALSDACMGTIASFLSKYQDIIIEHQKVVKGNQKRLESLRELAGKENLEYPSVTLPPQPHTKEGVDAYNEVIARVRMWVNLNLWQKLKLSRDDAKPLLRLKGFPSFPLVERQANEVDWWDMVCNVKKLINEKKEDGKVFWQNLAGYKRQEALRPYLSSEEDRKKGKKFARYQLGDLLLHLEKKHGEDWGKVYDEAWERIDKKVEGLSKHIKLEEERRSEDAQSKAALTDWLRAKASFVIEGLKEADKDEFCRCELKLQKWYGDLRGKPFAIEAENSILDISGFSKQYNCAFIWQKDGVKKLNLYLIINYFKGGKLRFKKIKPEAFEANRFYTVINKKSGEIVPMEVNFNFDDPNLIILPLAFGKRQGREFIWNDLLSLETGSLKLANGRVIEKTLYNRRTRQDEPALFVALTFERREVLDSSNIKPMNLIGVDRGENIPAVIALTDPEGCPLSRFKDSLGNPTHILRIGESYKEKQRTIQAKKEVEQRRAGGYSRKYASKAKNLADDMVRNTARDLLYYAVTQDAMLIFENLSRGFGRQGKRTFMAERQYTRMEDWLTAKLAYEGLPSKTYLSKTLAQYTSKTCSNCGFTITSADYDRVLEKLKKTATGWMTTINGKELKVEGQITYYNRYKRQNVVKDLSVELDRLSEESVNNDISSWTKGRSGEALSLLKKRFSHRPVQEKFVCLNCGFETHADEQAALNIARSWLFLRSQEYKKYQTNKTTGNTDKRAFVETWQSFYRKKLKEVWKPAV

SEQ ID NO: 198 - protein, 978 aa, synthetic construct
QEIKRINKIRRRLVKDSNTKKAGKTGPMKTLLVRVMTPDLRERLENLRKKPENIPQPISNTSRANLNKLLTDYTEMKKAILHVYWEEFQKDPVGLMSRVAQPASKKIDQNKLKPEMDEKGNLTTAGFACSQCGQPLFVYKLEQVSEKGKAYTNYFGRCNVAEHEKLIKLAQLKPEKDSDEAVTYSLGKFGQRALDFYSIHVTKESTHPVKPLAQIAGNRYASYPVGKALSDACMGTIASFLSKYQDIIIEHQKVVKGNQKRLESLRELAGKENLEYPSVTLPPQPHTKEGVDAYNEVIARVRMWVNLNLWQKLKLSRDDAKPLLRLKGFPSFPLVERQANEVDWWDMVCNVKKLINEKKEDGKVFWQNLAGYKRQEALRPYLSSEEDRKKGKKFARYQLGDLLLHLEKKHGEDWGKVYDEAWERIDKKVEGLSKHIKLEEERRSEDAQSKAALTDWLRAKASFVIEGLKEADKDEFCRCELKLQKWYGDLRGKPFAIEAENSILDISGFSKQYNCAFIWQKDGVKKLNLYLIINYFKGGKLRFKKIKPEAFEANRFYTVINKKSGEIVPMEVNFNFDDPNLIILPLAFGKRQGREFIWNDLLSLETGSLKLANGRVIEKTLYNRRTRQDEPALFVALTFERREVLDSSNIKPMNLIGVDRGENIPAVIALTDPEGCPLSRFKDSLGNPTHILRIGESYKEKQRTIQAKKEVEQRRAGGYSRKYASKAKNLADDMVRNTARDLLYYAVTQDAMLIFENLSRGFGRQGKRTFMAERQYTRMEDWLTAKLAYEGLPSKTYLSKTLAQYTSKTCSNCGFTITSADYDRVLEKLKKTATGWMTTINGKELKVEGQITYYNRYKRQNVVKDLSVELDRLSEESVNNDISSWTKGRSGEALSLLKKRFSHRPVQEKFVCLNCGFETHADEQAALNIARSWLFLRSQEYKKYQTNKTTGNTDKRAFVETWQSFYRKKLKEVWKPAV

SEQ ID NO: 199 - protein, 978 aa, synthetic construct
QEIKRINKIRRRLVKDSNTKKAGKTGPMKTLLVRVMTPDLRERLENLRKKPENIPQPISNTSRANLNKLLTDYTEMKKAILHVYWEEFQKDPVGLMSRVAQPASKKIDQNKLKPEMDEKGNLTTAGFACSQCGQPLFVYKLEQVSEKGKAYTNYFGRCNVAEHEKLIKLAQLKPEKDSDEAVTYSLGKFGQRALDFYSIHVTKESTHPVKPLAQIAGNRYASHPVGKALSDACMGTIASFLSKYQDIIIEHQKVVKGNQKRLESLRELAGKENLEYPSVTLPPQPHTKEGVDAYNEVIARVRMWVNLNLWQKLKLSRDDAKPLLRLKGFPSFPLVERQANEVDWWDMVCNVKKLINEKKEDGKVFWQNLAGYKRQEALRPYLSSEEDRKKGKKFARYQLGDLLLHLEKKHGEDWGKVYDEAWERIDKKVEGLSKHIKLEEERRSEDAQSKAALTDWLRAKASFVIEGLKEADKDEFCRCELKLQKWYGDLRGKPFAIEAENSILDISGFSKQYNCAFIWQKDGVKKLNLYLIINYFKGGKLRFKKIKPEAFEANRFYTVINKKSGEIVPMEVNFNFDDPNLIILPLAFGKRQGREFIWNDLLSLETGSLKLANGRVIEKTLYNRRTRQDEPALFVALTFERREVLDSSNIKPMNLIGVDRGENIPAVIALTDPEGCPLSRFKDSLGNPTHILRIGESYKEKQRTIQAKKEVEQRRAGGYSRKYASKAKNLADDMVRNTARDLLYYAVTQDAMLIFENLSRGFGRQGKRTFMAERQYTRMEDWLTAKLAYEGLPSKTYLSKTLAQYTSKTCSNCGFTITSADYDRVLEKLKKTATGWMTTINGKELKVEGQITYYNRYKRQNVVKDLSVELDRLSEESVNNDISSWTKGRSGEALSLLKKRFSHRPVQEKFVCLNCGFETHADEQAALNIARSWLFLRSQEYKKYQTNKTTGNTDKRAFVETWQSFYRKKLKEVWKPAV

SEQ ID NO: 200 - protein, 979 aa, synthetic construct
QEIKRINKIRRRLVKDSNTKKAGKTRGPMKTLLVRVMTPDLRERLENLRKKPENIPQPISNTSRANLNKLLTDYTEMKKAILHVYWEEFQKDPVGLMSRVAQPASKKIDQNKLKPEMDEKGNLTTAGFACSQCGQPLFVYKLEQVSEKGKAYTNYFGRCNVAEHEKLIKLAQLKPEKDSDEAVTYSLGKFGQRALDFYSIHVTKESTHPVKPLAQIAGNRYASYPVGKALSDACMGTIASFLSKYQDIIIEHQKVVKGNQKRLESLRELAGKENLEYPSVTLPPQPHTKEGVDAYNEVIARVRMWVNLNLWQKLKLSRDDAKPLLRLKGFPSFPLVERQANEVDWWDMVCNVKKLINEKKEDGKVFWQNLAGYKRQEALRPYLSSEEDRKKGKKFARYQLGDLLLHLEKKHGEDWGKVYDEAWERIDKKVEGLSKHIKLEEERRSEDAQSKAALTDWLRAKASFVIEGLKEADKDEFCRCELKLQKWYGDLRGKPFAIEAENSILDISGFSKQYNCAFIWQKDGVKKLNLYLIINYFKGGKLRFKKIKPEAFEANRFYTVINKKSGEIVPMEVNFNFDDPNLIILPLAFGKRQGREFIWNDLLSLETGSLKLANGRVIEKTLYNRRTRQDEPALFVALTFERREVLDSSNIKPMNLIGVDRGENIPAVIALTDPEGCPLSRFKDSLGNPTHILRIGESYKEKQRTIQAKKEVEQRRAGGYSRKYASKAKNLADDMVRNTARDLLYYAVTQDAMLIFENLSRGFGRQGKRTFMAERQYTRMEDWLTAKLAYEGLPSKTYLSKTLAQYTSKTCSNCGFTITSADYDRVLEKLKKTATGWMTTINGKELKVEGQITYYNRYKRQNVVKDLSVELDRLSEESVNNDISSWTKGRSGEALSLLKKRFSHRPVQEKFVCLNCGFETHADEQAALNIARSWLFLRSQEYKKYQTNKTTGNTDKRAFVETWQSFYRKKLKEVWKPAV

SEQ ID NO: 201 - protein, 979 aa, synthetic construct
QEIKRINKIRRRLVKDSNTKKAGKTRGPMKTLLVRVMTPDLRERLENLRKKPENIPQPISNTSRANLNKLLTDYTEMKKAILHVYWEEFQKDPVGLMSRVAQPASKKIDQNKLKPEMDEKGNLTTAGFACSQCGQPLFVYKLEQVSEKGKAYTNYFGRCNVAEHEKLIKLAQLKPEKDSDEAVTYSLGKFGQRALDFYSIHVTKESTHPVKPLAQIAGNRYASHPVGKALSDACMGTIASFLSKYQDIIIEHQKVVKGNQKRLESLRELAGKENLEYPSVTLPPQPHTKEGVDAYNEVIARVRMWVNLNLWQKLKLSRDDAKPLLRLKGFPSFPLVERQANEVDWWDMVCNVKKLINEKKEDGKVFWQNLAGYKRQEALRPYLSSEEDRKKGKKFARYQLGDLLLHLEKKHGEDWGKVYDEAWERIDKKVEGLSKHIKLEEERRSEDAQSKAALTDWLRAKASFVIEGLKEADKDEFCRCELKLQKWYGDLRGKPFAIEAENSILDISGFSKQYNCAFIWQKDGVKKLNLYLIINYFKGGKLRFKKIKPEAFEANRFYTVINKKSGEIVPMEVNFNFDDPNLIILPLAFGKRQGREFIWNDLLSLETGSLKLANGRVIEKTLYNRRTRQDEPALFVALTFERREVLDSSNIKPMNLIGVDRGENIPAVIALTDPEGCPLSRFKDSLGNPTHILRIGESYKEKQRTIQAKKEVEQRRAGGYSRKYASKAKNLADDMVRNTARDLLYYAVTQDAMLIFENLSRGFGRQGKRTFMAERQYTRMEDWLTAKLAYEGLPSKTYLSKTLAQYTSKTCSNCGFTITSADYDRVLEKLKKTATGWMTTINGKELKVEGQITYYNRYKRQNVVKDLSVELDRLSEESVNNDISSWTKGRSGEALSLLKKRFSHRPVQEKFVCLNCGFETHADEQAALNIARSWLFLRSQEYKKYQTNKTTGNTDKRAFVETWQSFYRKKLKEVWKPAV

SEQ ID NO: 202 - protein, 978 aa, synthetic construct
QEIKRINKIRRRLVKDSNTKKAGKTGPMKTLLVRVMTPDLRERLENLRKKPENIPQPISNTSRANLNKLLTDYTEMKKAILHVYWEEFQKDPVGLMSRVAQPASKKIDQNKLKPEMDEKGNLTTAGFACSQCGQPLFVYKLEQVSEKGKAYTNYFGRCNVAEHEKLIKLAQLKPEKDSDEAVTYSLGKFGQRALDFYSIHVTKESTHPVKPLAQIAGNRYASHPVGKALSGACMGTIASFLSKYQDIIIEHQKVVKGNQKRLESLRELAGKENLEYPSVTLPPQPHTKEGVDAYNEVIARVRMWVNLNLWQKLKLSRDDAKPLLRLKGFPSFPLVERQANEVDWWDMVCNVKKLINEKKEDGKVFWQNLAGYKRQEALRPYLSSEEDRKKGKKFARYQLGDLLLHLEKKHGEDWGKVYDEAWERIDKKVEGLSKHIKLEEERRSEDAQSKAALTDWLRAKASFVIEGLKEADKDEFCRCELKLQKWYGDLRGKPFAIEAENSILDISGFSKQYNCAFIWQKDGVKKLNLYLIINYFKGGKLRFKKIKPEAFEANRFYTVINKKSGEIVPMEVNFNFDDPNLIILPLAFGKRQGREFIWNDLLSLETGSLKLANGRVIEKTLYNRRTRQDEPALFVALTFERREVLDSSNIKPMNLIGVDRGENIPAVIALTDPEGCPLSRFKDSLGNPTHILRIGESYKEKQRTIQAKKEVEQRRAGGYSRKYASKAKNLADDMVRNTARDLLYYAVTQDAMLIFENLSRGFGRQGKRTFMAERQYTRMEDWLTAKLAYEGLPSKTYLSKTLAQYTSKTCSNCGFTITSADYDRVLEKLKKTATGWMTTINGKELKVEGQITYYNRYKRQNVVKDLSVELDRLSEESVNNDISSWTKGRSGEALSLLKKRFSHRPVQEKFVCLNCGFETHADEQAALNIARSWLFLRSQEYKKYQTNKTTGNTDKRAFVETWQSFYRKKLKEVWKPAV

SEQ ID NO: 203 - protein, 978 aa, synthetic construct
QEIKSINKIRRRLVKDSNTKKAGKTGPMKTLLVRVMTPDLRERLENLRKKPENIPQPISNTSRANLNKLLTDYTEMKKAILHVYWEEFQKDPVGLMSRVAQPASKKIDQNKLKPEMDEKGNLTTAGFACSQCGQPLFVYKLEQVSEKGKAYTNYFGRCNVAEHEKLIKLAQLKPEKDSDEAVTYSLGKFGQRALDFYSIHVTKESTHPVKPLAQIAGNRYASGPVGKALSDACMGTIASFLSKYQDIIIEHQKVVKGNQKRLESLRELAGKENLEYPSVTLPPQPHTKEGVDAYNEVIARVRMWVNLNLWQKLKLSRDDAKPLLRLKGFPSFPLVERQANEVDWWDMVCNVKKLINEKKEDGKVFWQNLAGYKRQEALRPYLSSEEDRKKGKKFARYQLGDLLLHLEKKHGEDWGKVYDEAWERIDKKVEGLSKHIKLEEERRSEDAQSKAALTDWLRAKASFVIEGLKEADKDEFCRCELKLQKWYGDLRGKPFAIEAENSILDISGFSKQYNCAFIWQKDGVKKLNLYLIINYFKGGKLRFKKIKPEAFEANRFYTVINKKSGEIVPMEVNFNFDDPNLIILPLAFGKRQGREFIWNDLLSLETGSLKLANGRVIEKTLYNRRTRQDEPALFVALTFERREVLDSSNIKPMNLIGVDRGENIPAVIALTDPEGCPLSRFKDSLGNPTHILRIGESYKEKQRTIQAKKEVEQRRAGGYSRKYASKAKNLADDMVRNTARDLLYYAVTQDAMLIFENLSRGFGRQGKRTFMAERQYTRMEDWLTAKLAYEGLPSKTYLSKTLAQYTSKTCSNCGFTITSADYDRVLEKLKKTATGWMTTINGKELKVEGQITYYNRYKRQNVVKDLSVELDRLSEESVNNDISSWTKGRSGEALSLLKKRFSHRPVQEKFVCLNCGFETHADEQAALNIARSWLFLRSQEYKKYQTNKTTGNTDKRAFVETWQSFYRKKLKEVWKPAV

SEQ ID NO: 204 - protein, 978 aa, synthetic construct
QEISRINKIRRRLVKDSNTKKAGKTGPMKTLLVRVMTPDLRERLENLRKKPENIPQPISNTSRANLNKLLTDYTEMKKAILHVYWEEFQKDPVGLMSRVAQPASKKIDQNKLKPEMDEKGNLTTAGFACSQCGQPLFVYKLEQVSEKGKAYTNYFGRCNVAEHEKLIKLAQLKPEKDSDEAVTYSLGKFGQRALDFYSIHVTKESTHPVKPLAQIAGNRYASGPVGKALSDACMGTIASFLSKYQDIIIEHQKVVKGNQKRLESLRELAGKENLEYPSVTLPPQPHTKEGVDAYNEVIARVRMWVNLNLWQKLKLSRDDAKPLLRLKGFPSFPLVERQANEVDWWDMVCNVKKLINEKKEDGKVFWQNLAGYKRQEALRPYLSSEEDRKKGKKFARYQLGDLLLHLEKKHGEDWGKVYDEAWERIDKKVEGLSKHIKLEEERRSEDAQSKAALTDWLRAKASFVIEGLKEADKDEFCRCELKLQKWYGDLRGKPFAIEAENSILDISGFSKQYNCAFIWQKDGVKKLNLYLIINYFKGGKLRFKKIKPEAFEANRFYTVINKKSGEIVPMEVNFNFDDPNLIILPLAFGKRQGREFIWNDLLSLETGSLKLANGRVIEKTLYNRRTRQDEPALFVALTFERREVLDSSNIKPMNLIGVDRGENIPAVIALTDPEGCPLSRFKDSLGNPTHILRIGESYKEKQRTIQAKKEVEQRRAGGYSRKYASKAKNLADDMVRNTARDLLYYAVTQDAMLIFENLSRGFGRQGKRTFMAERQYTRMEDWLTAKLAYEGLPSKTYLSKTLAQYTSKTCSNCGFTITSADYDRVLEKLKKTATGWMTTINGKELKVEGQITYYNRYKRQNVVKDLSVELDRLSEESVNNDISSWTKGRSGEALSLLKKRFSHRPVQEKFVCLNCGFETHADEQAALNIARSWLFLRSQEYKKYQTNKTTGNTDKRAFVETWQSFYRKKLKEVWKPAV

SEQ ID NO: 205 - protein, 979 aa, synthetic construct
QEIKSINKIRRRLVKDSNTKKAGKTRGPMKTLLVRVMTPDLRERLENLRKKPENIPQPISNTSRANLNKLLTDYTEMKKAILHVYWEEFQKDPVGLMSRVAQPASKKIDQNKLKPEMDEKGNLTTAGFACSQCGQPLFVYKLEQVSEKGKAYTNYFGRCNVAEHEKLIKLAQLKPEKDSDEAVTYSLGKFGQRALDFYSIHVTKESTHPVKPLAQIAGNRYASSPVGKALSDACMGTIASFLSKYQDIIIEHQKVVKGNQKRLESLRELAGKENLEYPSVTLPPQPHTKEGVDAYNEVIARVRMWVNLNLWQKLKLSRDDAKPLLRLKGFPSFPLVERQANEVDWWDMVCNVKKLINEKKEDGKVFWQNLAGYKRQEALRPYLSSEEDRKKGKKFARYQLGDLLLHLEKKHGEDWGKVYDEAWERIDKKVEGLSKHIKLEEERRSEDAQSKAALTDWLRAKASFVIEGLKEADKDEFCRCELKLQKWYGDLRGKPFAIEAENSILDISGFSKQYNCAFIWQKDGVKKLNLYLIINYFKGGKLRFKKIKPEAFEANRFYTVINKKSGEIVPMEVNFNFDDPNLIILPLAFGKRQGREFIWNDLLSLETGSLKLANGRVIEKTLYNRRTRQDEPALFVALTFERREVLDSSNIKPMNLIGVDRGENIPAVIALTDPEGCPLSRFKDSLGNPTHILRIGESYKEKQRTIQAKKEVEQRRAGGYSRKYASKAKNLADDMVRNTARDLLYYAVTQDAMLIFENLSRGFGRQGKRTFMAERQYTRMEDWLTAKLAYEGLPSKTYLSKTLAQYTSKTCSNCGFTITSADYDRVLEKLKKTATGWMTTINGKELKVEGQITYYNRYKRQNVVKDLSVELDRLSEESVNNDISSWTKGRSGEALSLLKKRFSHRPVQEKFVCLNCGFETHADEQAALNIARSWLFLRSQEYKKYQTNKTTGNTDKRAFVETWQSFYRKKLKEVWKPAV

SEQ ID NO: 206 - protein, 979 aa, synthetic construct
QEISRINKIRRRLVKDSNTKKAGKTRGPMKTLLVRVMTPDLRERLENLRKKPENIPQPISNTSRANLNKLLTDYTEMKKAILHVYWEEFQKDPVGLMSRVAQPASKKIDQNKLKPEMDEKGNLTTAGFACSQCGQPLFVYKLEQVSEKGKAYTNYFGRCNVAEHEKLIKLAQLKPEKDSDEAVTYSLGKFGQRALDFYSIHVTKESTHPVKPLAQIAGNRYASSPVGKALSDACMGTIASFLSKYQDIIIEHQKVVKGNQKRLESLRELAGKENLEYPSVTLPPQPHTKEGVDAYNEVIARVRMWVNLNLWQKLKLSRDDAKPLLRLKGFPSFPLVERQANEVDWWDMVCNVKKLINEKKEDGKVFWQNLAGYKRQEALRPYLSSEEDRKKGKKFARYQLGDLLLHLEKKHGEDWGKVYDEAWERIDKKVEGLSKHIKLEEERRSEDAQSKAALTDWLRAKASFVIEGLKEADKDEFCRCELKLQKWYGDLRGKPFAIEAENSILDISGFSKQYNCAFIWQKDGVKKLNLYLIINYFKGGKLRFKKIKPEAFEANRFYTVINKKSGEIVPMEVNFNFDDPNLIILPLAFGKRQGREFIWNDLLSLETGSLKLANGRVIEKTLYNRRTRQDEPALFVALTFERREVLDSSNIKPMNLIGVDRGENIPAVIALTDPEGCPLSRFKDSLGNPTHILRIGESYKEKQRTIQAKKEVEQRRAGGYSRKYASKAKNLADDMVRNTARDLLYYAVTQDAMLIFENLSRGFGRQGKRTFMAERQYTRMEDWLTAKLAYEGLPSKTYLSKTLAQYTSKTCSNCGFTITSADYDRVLEKLKKTATGWMTTINGKELKVEGQITYYNRYKRQNVVKDLSVELDRLSEESVNNDISSWTKGRSGEALSLLKKRFSHRPVQEKFVCLNCGFETHADEQAALNIARSWLFLRSQEYKKYQTNKTTGNTDKRAFVETWQSFYRKKLKEVWKPAV

SEQ ID NO: 207 - protein, 979 aa, synthetic construct
QEIKSINKIRRRLVKDSNTKKAGKTRGPMKTLLVRVMTPDLRERLENLRKKPENIPQPISNTSRANLNKLLTDYTEMKKAILHVYWEEFQKDPVGLMSRVAQPASKKIDQNKLKPEMDEKGNLTTAGFACSQCGQPLFVYKLEQVSEKGKAYTNYFGRCNVAEHEKLIKLAQLKPEKDSDEAVTYSLGKFGQRALDFYSIHVTKESTHPVKPLAQIAGNRYASSPVGKALSGACMGTIASFLSKYQDIIIEHQKVVKGNQKRLESLRELAGKENLEYPSVTLPPQPHTKEGVDAYNEVIARVRMWVNLNLWQKLKLSRDDAKPLLRLKGFPSFPLVERQANEVDWWDMVCNVKKLINEKKEDGKVFWQNLAGYKRQEALRPYLSSEEDRKKGKKFARYQLGDLLLHLEKKHGEDWGKVYDEAWERIDKKVEGLSKHIKLEEERRSEDAQSKAALTDWLRAKASFVIEGLKEADKDEFCRCELKLQKWYGDLRGKPFAIEAENSILDISGFSKQYNCAFIWQKDGVKKLNLYLIINYFKGGKLRFKKIKPEAFEANRFYTVINKKSGEIVPMEVNFNFDDPNLIILPLAFGKRQGREFIWNDLLSLETGSLKLANGRVIEKTLYNRRTRQDEPALFVALTFERREVLDSSNIKPMNLIGVDRGENIPAVIALTDPEGCPLSRFKDSLGNPTHILRIGESYKEKQRTIQAKKEVEQRRAGGYSRKYASKAKNLADDMVRNTARDLLYYAVTQDAMLIFENLSRGFGRQGKRTFMAERQYTRMEDWLTAKLAYEGLPSKTYLSKTLAQYTSKTCSNCGFTITSADYDRVLEKLKKTATGWMTTINGKELKVEGQITYYNRYKRQNVVKDLSVELDRLSEESVNNDISSWTKGRSGEALSLLKKRFSHRPVQEKFVCLNCGFETHADEQAALNIARSWLFLRSQEYKKYQTNKTTGNTDKRAFVETWQSFYRKKLKEVWKPAV

SEQ ID NO: 208 - protein, 979 aa, synthetic construct
QEISRINKIRRRLVKDSNTKKAGKTRGPMKTLLVRVMTPDLRERLENLRKKPENIPQPISNTSRANLNKLLTDYTEMKKAILHVYWEEFQKDPVGLMSRVAQPASKKIDQNKLKPEMDEKGNLTTAGFACSQCGQPLFVYKLEQVSEKGKAYTNYFGRCNVAEHEKLIKLAQLKPEKDSDEAVTYSLGKFGQRALDFYSIHVTKESTHPVKPLAQIAGNRYASSPVGKALSGACMGTIASFLSKYQDIIIEHQKVVKGNQKRLESLRELAGKENLEYPSVTLPPQPHTKEGVDAYNEVIARVRMWVNLNLWQKLKLSRDDAKPLLRLKGFPSFPLVERQANEVDWWDMVCNVKKLINEKKEDGKVFWQNLAGYKRQEALRPYLSSEEDRKKGKKFARYQLGDLLLHLEKKHGEDWGKVYDEAWERIDKKVEGLSKHIKLEEERRSEDAQSKAALTDWLRAKASFVIEGLKEADKDEFCRCELKLQKWYGDLRGKPFAIEAENSILDISGFSKQYNCAFIWQKDGVKKLNLYLIINYFKGGKLRFKKIKPEAFEANRFYTVINKKSGEIVPMEVNFNFDDPNLIILPLAFGKRQGREFIWNDLLSLETGSLKLANGRVIEKTLYNRRTRQDEPALFVALTFERREVLDSSNIKPMNLIGVDRGENIPAVIALTDPEGCPLSRFKDSLGNPTHILRIGESYKEKQRTIQAKKEVEQRRAGGYSRKYASKAKNLADDMVRNTARDLLYYAVTQDAMLIFENLSRGFGRQGKRTFMAERQYTRMEDWLTAKLAYEGLPSKTYLSKTLAQYTSKTCSNCGFTITSADYDRVLEKLKKTATGWMTTINGKELKVEGQITYYNRYKRQNVVKDLSVELDRLSEESVNNDISSWTKGRSGEALSLLKKRFSHRPVQEKFVCLNCGFETHADEQAALNIARSWLFLRSQEYKKYQTNKTTGNTDKRAFVETWQSFYRKKLKEVWKPAV

SEQ ID NO: 209 - protein, 979 aa, synthetic construct
QEIKRINKIRRRLVKDSNTKKAGKTGPMKTLLVRVMTPDLRERLENLRKKPENIPQPISNTSRANLNKLLTDYTEMKKAILHVYWEEFQKDPVGLMSRVAQPASKKIDQNKLKPEMDEKGNLTTAGFACSQCGQPLFVYKLEQVSEKGKAYTNYFGRCNVAEHEKLILLAQLKPEKDSDEAVTYSLGKFGQRALDFYSIHVTKESTHPVKPLAQIAGNRYASGPVGKALSDACMGTIASFLSKYQDIIIEHQKVVKGNQKRLESLRELAGKENLEYPSVTLPPQPHTKEGVDAYNEVIARVRMWVNLNLWQKLKLSRDDAKPLLRLKGFPSFPLVERQANEVDWWDMVCNVKKLINEKKEDGKVFWQNLAGYKRQEALRPYLSSEEDRKKGKKFARYQLGDLLLHLEKKHGEDWGKVYDEAWERIDKKVEGLSKHIKLEEERRSEDAQSKAALTDWLRAKASFVIEGLKEADKDEFCRCELKLQKWYGDLRGKPFAIEAENSILDISGFSKQYNCAFIWQKDGVKKLNLYLIINYFKGGKLRFKKIKPEAFEANRFYTVINKKSGEIVPMEVNFNFDDPNLIILPLAFGKRQGREFIWNDLLSLETGSLKLANGRVIEKTLYNARRTRQDEPALFVALTFERREVLDSSNIKPMNLIGVDRGENIPAVIALTDPEGCPLSRFKDSLGNPTHILRIGESYKEKQRTIQAKKEVEQRRAGGYSRKYASKAKNLADDMVRNTARDLLYYAVTQDAMLIFENLSRGFGRQGKRTFMAERQYTRMEDWLTAKLAYEGLPSKTYLSKTLAQYTSKTCSNCGFTITSADYDRVLEKLKKTATGWMTTINGKELKVEGQITYYNRYKRQNVVKDLSVELDRLSEESVNNDISSWTKGRSGEALSLLKKRFSHRPVQEKFVCLNCGFETHADEQAALNIARSWLFLRSQEYKKYQTNKTTGNTDKRAFVETWQSFYRKKLKEVWKPAV

SEQ ID NO: 210 - protein, 978 aa, synthetic construct
QEIKRINKIRRRLVKDSNTKKAGKTGPMKTLLVRVMTPDLRERLENLRKKPENIPQPISNTSRANLNKLLTDYTEMKKAILHVYWEEFQVDPVGLMSRVAQPASKKIDQNKLKPEMDEKGNLTTAGFACSQCGQPLFVYKLEQVSEKGKAYTNYFGRCNVAEHEKLILLAQLKPEKDSDEAVTYSLGKFGQRALDFYSIHVTKESTHPVKPLAQIAGNRYASGPVGKALSDACMGTIASFLSKYQDIIIEHQKVVKGNQKRLESLRELAGKENLEYPSVTLPPQPHTKEGVDAYNEVIARVRMWVNLNLWQKLKLSRDDAKPLLRLKGFPSFPLVERQANEVDWWDMVCNVKKLINEKKEDGKVFWQNLAGYKRQEALRPYLSSEEDRKKGKKFARYQLGDLLLHLEKKHGEDWGKVYDEAWERIDKKVEGLSKHIKLEEERRSEDAQSKAALTDWLRAKASFVIEGLKEADKDEFCRCELKLQKWYGDLRGKPFAIEAENSILDISGFSKQYNCAFIWQKDGVKKLNLYLIINYFKGGKLRFKKIKPEAFEANRFYTVINKKSGEIVPMEVNFNFDDPNLIILPLAFGKRQGREFIWNDLLSLETGSLKLANGRVIEKTLYNRRTRQDEPALFVALTFERREVLDSSNIKPMNLIGVDRGENIPAVIALTDPEGCPLSRFKDSLGNPTHILRIGESYKEKQRTIQAKKEVEQRRAGGYSRKYASKAKNLADDMVRNTARDLLYYAVTQDAMLIFENLSRGFGRQGKRTFMAERQYTRMEDWLTAKLAYEGLPSKTYLSKTLAQYTSKTCSNCGFTITSADYDRVLEKLKKTATGWMTTINGKELKVEGQITYYNRYKRQNVVKDLSVELDRLSEESVNNDISSWTKGRSGEALSLLKKRFSHRPVQEKFVCLNCGFETHADEQAALNIARSWLFLRSQEYKKYQTNKTTGNTDKRAFVETWQSFYRKKLKEVWKPAV

SEQ ID NO: 211 - protein, 979 aa, synthetic construct
QEIKRINKIRRRLVKDSNTKKAGKTGPMKTLLVRVMTPDLRERLENLRKKPENIPQPISNTSRANLNKLLTDYTEMKKAILHVYWEGEFQKDPVGLMSRVAQPASKKIDQNKLKPEMDEKGNLTTAGFACSQCGQPLFVYKLEQVSEKGKAYTNYFGRCNVAEHEKLILLAQLKPEKDSDEAVTYSLGKFGQRALDFYSIHVTKESTHPVKPLAQIAGNRYASGPVGKALSDACMGTIASFLSKYQDIIIEHQKVVKGNQKRLESLRELAGKENLEYPSVTLPPQPHTKEGVDAYNEVIARVRMWVNLNLWQKLKLSRDDAKPLLRLKGFPSFPLVERQANEVDWWDMVCNVKKLINEKKEDGKVFWQNLAGYKRQEALRPYLSSEEDRKKGKKFARYQLGDLLLHLEKKHGEDWGKVYDEAWERIDKKVEGLSKHIKLEEERRSEDAQSKAALTDWLRAKASFVIEGLKEADKDEFCRCELKLQKWYGDLRGKPFAIEAENSILDISGFSKQYNCAFIWQKDGVKKLNLYLIINYFKGGKLRFKKIKPEAFEANRFYTVINKKSGEIVPMEVNFNFDDPNLIILPLAFGKRQGREFIWNDLLSLETGSLKLANGRVIEKTLYNRRTRQDEPALFVALTFERREVLDSSNIKPMNLIGVDRGENIPAVIALTDPEGCPLSRFKDSLGNPTHILRIGESYKEKQRTIQAKKEVEQRRAGGYSRKYASKAKNLADDMVRNTARDLLYYAVTQDAMLIFENLSRGFGRQGKRTFMAERQYTRMEDWLTAKLAYEGLPSKTYLSKTLAQYTSKTCSNCGFTITSADYDRVLEKLKKTATGWMTTINGKELKVEGQITYYNRYKRQNVVKDLSVELDRLSEESVNNDISSWTKGRSGEALSLLKKRFSHRPVQEKFVCLNCGFETHADEQAALNIARSWLFLRSQEYKKYQTNKTTGNTDKRAFVETWQSFYRKKLKEVWKPAV

SEQ ID NO: 212 - protein, 978 aa, synthetic construct
QEIKRINKIRRRLVKDSNTKKAGKTGPMKTLLVRVMTPDLRERLENLRKKPENIPQPISNTSRANLNKLLTDYTEMKKAILHVYWEEFQKDPVGLMSRVAQPASKKIDQNKLKPEMDEKGNLTTAGFACSQCGQPLFVYKLEQVSEKGKAYTNYFGRCNVAEHEKLILLAQLKPEKDSDEAVTYSLGKFGQRALDFYSIHVTKESTHPVKPLAQIAGNRYASGPVGKALSDACMGTIASFLSKYQDIIIEHQKVVKGNQKRLEHLRELAGKENLEYPSVTLPPQPHTKEGVDAYNEVIARVRMWVNLNLWQKLKLSRDDAKPLLRLKGFPSFPLVERQANEVDWWDMVCNVKKLINEKKEDGKVFWQNLAGYKRQEALRPYLSSEEDRKKGKKFARYQLGDLLLHLEKKHGEDWGKVYDEAWERIDKKVEGLSKHIKLEEERRSEDAQSKAALTDWLRAKASFVIEGLKEADKDEFCRCELKLQKWYGDLRGKPFAIEAENSILDISGFSKQYNCAFIWQKDGVKKLNLYLIINYFKGGKLRFKKIKPEAFEANRFYTVINKKSGEIVPMEVNFNFDDPNLIILPLAFGKRQGREFIWNDLLSLETGSLKLANGRVIEKTLYNRRTRQDEPALFVALTFERREVLDSSNIKPMNLIGVDRGENIPAVIALTDPEGCPLSRFKDSLGNPTHILRIGESYKEKQRTIQAKKEVEQRRAGGYSRKYASKAKNLADDMVRNTARDLLYYAVTQDAMLIFENLSRGFGRQGKRTFMAERQYTRMEDWLTAKLAYEGLPSKTYLSKTLAQYTSKTCSNCGFTITSADYDRVLEKLKKTATGWMTTINGKELKVEGQITYYNRYKRQNVVKDLSVELDRLSEESVNNDISSWTKGRSGEALSLLKKRFSHRPVQEKFVCLNCGFETHADEQAALNIARSWLFLRSQEYKKYQTNKTTGNTDKRAFVETWQSFYRKKLKEVWKPAV

SEQ ID NO: 213 - protein, 979 aa, synthetic construct
QEIKRINKIRRRLVKDSNTKKAGKTGPMKTLLVRVMTPDLRERLENLRKKPENIPQPISNTSRANLNKLLTDYTEMKKAILHVYWEEFQKDPVGLMSRVAQPASKKIDQNKLKPEMDEKGNLTTAGFACSQCGQPLFVYKLEQVSEKGKAYTNYFGRCNVAEHEKLILLAQLKPEKDSDEAVTYSLGKFGQRALDFYSIHVTKESTHPVKPLAQICAGNRYASGPVGKALSDACMGTIASFLSKYQDIIIEHQKVVKGNQKRLESLRELAGKENLEYPSVTLPPQPHTKEGVDAYNEVIARVRMWVNLNLWQKLKLSRDDAKPLLRLKGFPSFPLVERQANEVDWWDMVCNVKKLINEKKEDGKVFWQNLAGYKRQEALRPYLSSEEDRKKGKKFARYQLGDLLLHLEKKHGEDWGKVYDEAWERIDKKVEGLSKHIKLEEERRSEDAQSKAALTDWLRAKASFVIEGLKEADKDEFCRCELKLQKWYGDLRGKPFAIEAENSILDISGFSKQYNCAFIWQKDGVKKLNLYLIINYFKGGKLRFKKIKPEAFEANRFYTVINKKSGEIVPMEVNFNFDDPNLIILPLAFGKRQGREFIWNDLLSLETGSLKLANGRVIEKTLYNRRTRQDEPALFVALTFERREVLDSSNIKPMNLIGVDRGENIPAVIALTDPEGCPLSRFKDSLGNPTHILRIGESYKEKQRTIQAKKEVEQRRAGGYSRKYASKAKNLADDMVRNTARDLLYYAVTQDAMLIFENLSRGFGRQGKRTFMAERQYTRMEDWLTAKLAYEGLPSKTYLSKTLAQYTSKTCSNCGFTITSADYDRVLEKLKKTATGWMTTINGKELKVEGQITYYNRYKRQNVVKDLSVELDRLSEESVNNDISSWTKGRSGEALSLLKKRFSHRPVQEKFVCLNCGFETHADEQAALNIARSWLFLRSQEYKKYQTNKTTGNTDKRAFVETWQSFYRKKLKEVWKPAV

SEQ ID NO: 214 - protein, 976 aa, synthetic construct
QEIKRINKIRRRLVKDSNTKKAGKTGPMKTLLVRVMTPDLRERLENLRKKPENIPQPISNTSRANLNKLLTDYTEMKKAILHVYWEEFQKDPVGLMSRVAQPASKKIDQNKLKPEMDEKGNLTTAGFACSQCGQPLFVYKLEQVSEKGKAYTNYFGRCNVAEHEKLILLAQLKPEKDSDEAVTYSLGKFGQRALDFYSIHVTKESTHPVKPLAQIAGNRYASGPVGKALSDACMGTIASFLSKYQDIIIEHQKVVKGNQKRLESLRELAGKENLEYPSVTLPPQPHTKEGVDAYNEVIARVRMWVNLNLWQKLKLSRDDAKPLLRLKGFPSFPLVERQANEVDWWVCNVKKLINEKKEDGKVFWQNLAGYKRQEALRPYLSSEEDRKKGKKFARYQLGDLLLHLEKKHGEDWGKVYDEAWERIDKKVEGLSKHIKLEEERRSEDAQSKAALTDWLRAKASFVIEGLKEADKDEFCRCELKLQKWYGDLRGKPFAIEAENSILDISGFSKQYNCAFIWQKDGVKKLNLYLIINYFKGGKLRFKKIKPEAFEANRFYTVINKKSGEIVPMEVNFNFDDPNLIILPLAFGKRQGREFIWNDLLSLETGSLKLANGRVIEKTLYNRRTRQDEPALFVALTFERREVLDSSNIKPMNLIGVDRGENIPAVIALTDPEGCPLSRFKDSLGNPTHILRIGESYKEKQRTIQAKKEVEQRRAGGYSRKYASKAKNLADDMVRNTARDLLYYAVTQDAMLIFENLSRGFGRQGKRTFMAERQYTRMEDWLTAKLAYEGLPSKTYLSKTLAQYTSKTCSNCGFTITSADYDRVLEKLKKTATGWMTTINGKELKVEGQITYYNRYKRQNVVKDLSVELDRLSEESVNNDISSWTKGRSGEALSLLKKRFSHRPVQEKFVCLNCGFETHADEQAALNIARSWLFLRSQEYKKYQTNKTTGNTDKRAFVETWQSFYRKKLKEVWKPAV

SEQ ID NO: 215 - protein, 978 aa, synthetic construct
QEIKRINKIRRRLVKDSNTKKAGKTGPMKTLLVRVMTPDLRERLENLRKKPENIPQPISNTSRANLNKLLTDYTEMKKAILHVYWEEFQKDPVGLMSRVAQPASKKIDQNKLKPEMDEKGNLTTAGFACSQCGQPLFVYKLEQVSEKGKAYTNYFGRCNVAEHEKLILLAQLKPEKDSDEAVTYSLGKFGQRALDFYSIHVTKESTHPVKPLAQIAGNRYASGPVGKALSDACMGTIASFLSKYQDIIIEHQKVVKGNQKRLESLRELAGKENLEYPSVTLPPQPHTKEGVDAYNEVIARVRMWVNLNLWQKLKLSRDDAKPLLRLKGFPSFPLVERQANEVDWWDMVCNVKKLINEKKEDGKVFWQNLAGYKRQEALRPYLSSEEDRKKGKKFARYQLGDLLLHLEKKHGEDWGKVYDEAWERIDKKVEGLSKHIKLEEERRSEDAQSKAALTDWLRAKASFVIEGLKEADKDEFCRCELKLQKWYGDLRGKPFAIEAENSILDISGFSKQYNCAFIWQKDGVKKLNLYLIINYFGGGKLRFKKIKPEAFEANRFYTVINKKSGEIVPMEVNFNFDDPNLIILPLAFGKRQGREFIWNDLLSLETGSLKLANGRVIEKTLYNRRTRQDEPALFVALTFERREVLDSSNIKPMNLIGVDRGENIPAVIALTDPEGCPLSRFKDSLGNPTHILRIGESYKEKQRTIQAKKEVEQRRAGGYSRKYASKAKNLADDMVRNTARDLLYYAVTQDAMLIFENLSRGFGRQGKRTFMAERQYTRMEDWLTAKLAYEGLPSKTYLSKTLAQYTSKTCSNCGFTITSADYDRVLEKLKKTATGWMTTINGKELKVEGQITYYNRYKRQNVVKDLSVELDRLSEESVNNDISSWTKGRSGEALSLLKKRFSHRPVQEKFVCLNCGFETHADEQAALNIARSWLFLRSQEYKKYQTNKTTGNTDKRAFVETWQSFYRKKLKEVWKPAV

SEQ ID NO: 216 - protein, 979 aa, synthetic construct
QEIKRINKIRRRLVKDSNTKKAGKTGPMKTLLVRVMTPDLRERLENLRKKPENIPQPISNTSRANLNKLLTDYTEMKKAILHVYWEEFQKDPVGLMSRVAQPASKKIDQNKLKPEMDEKGNLTTAGFACSQCGQPLFVYKLEQVSEKGKAYTNYFGRCNVAEHEKLILLAQLKPEKDSDEAVTYSLGKFGQRALDFYSIHVTKESTHPVKPLAQIAGNRYASGPVGKALSDACMGTIASFLSKYQDIIIEHQKVVKGNQKRLESLRELAGKENLEYPSVTLPPQPHTKEGVDAYNEVIARVRMWVNLNLWQKLKLSRDDAKPLLRLKGFPSFPLVERQANEVDWWDMVCNVKKLINEKKEDGKVFWQNLAGYKRQEALRPYLSSEEDRKKGKKFARYQLGDLLLHLEKKHGEDWGKLVYDEAWERIDKKVEGLSKHIKLEEERRSEDAQSKAALTDWLRAKASFVIEGLKEADKDEFCRCELKLQKWYGDLRGKPFAIEAENSILDISGFSKQYNCAFIWQKDGVKKLNLYLIINYFKGGKLRFKKIKPEAFEANRFYTVINKKSGEIVPMEVNFNFDDPNLIILPLAFGKRQGREFIWNDLLSLETGSLKLANGRVIEKTLYNRRTRQDEPALFVALTFERREVLDSSNIKPMNLIGVDRGENIPAVIALTDPEGCPLSRFKDSLGNPTHILRIGESYKEKQRTIQAKKEVEQRRAGGYSRKYASKAKNLADDMVRNTARDLLYYAVTQDAMLIFENLSRGFGRQGKRTFMAERQYTRMEDWLTAKLAYEGLPSKTYLSKTLAQYTSKTCSNCGFTITSADYDRVLEKLKKTATGWMTTINGKELKVEGQITYYNRYKRQNVVKDLSVELDRLSEESVNNDISSWTKGRSGEALSLLKKRFSHRPVQEKFVCLNCGFETHADEQAALNIARSWLFLRSQEYKKYQTNKTTGNTDKRAFVETWQSFYRKKLKEVWKPAV

SEQ ID NO: 217 - protein, 979 aa, synthetic construct
QEIKRINKIRRRLVKDSNTKKAGKTGPMKTLLVRVMTPDLRERLENLRKKPENIPQPISNTSRANLNKLLTDYTEMKKAILHVYWEEFQKDPVGLMSRVAQPASKKIDQNKLKPEMDEKGNLTTAGFACSQCGQPLFVYKLEQVSEKGKAYTNYFGRCNVAEHEKLILLAQLKPEKDSDEAVTYSLGKFGQRALDFYSIHVTKESTHPVKPLAQIAGNRYASGPVGKALSDACMGTIASFLSKYQDIIIEHQKVVKGNQKRLESLRELAGKENLEYPSVTLPPQPHTKEGVDAYNEVIARVRMWVNLNLWQKLKLSRDDAKPLLRLKGQFPSFPLVERQANEVDWWDMVCNVKKLINEKKEDGKVFWQNLAGYKRQEALRPYLSSEEDRKKGKKFARYQLGDLLLHLEKKHGEDWGKVYDEAWERIDKKVEGLSKHIKLEEERRSEDAQSKAALTDWLRAKASFVIEGLKEADKDEFCRCELKLQKWYGDLRGKPFAIEAENSILDISGFSKQYNCAFIWQKDGVKKLNLYLIINYFKGGKLRFKKIKPEAFEANRFYTVINKKSGEIVPMEVNFNFDDPNLIILPLAFGKRQGREFIWNDLLSLETGSLKLANGRVIEKTLYNRRTRQDEPALFVALTFERREVLDSSNIKPMNLIGVDRGENIPAVIALTDPEGCPLSRFKDSLGNPTHILRIGESYKEKQRTIQAKKEVEQRRAGGYSRKYASKAKNLADDMVRNTARDLLYYAVTQDAMLIFENLSRGFGRQGKRTFMAERQYTRMEDWLTAKLAYEGLPSKTYLSKTLAQYTSKTCSNCGFTITSADYDRVLEKLKKTATGWMTTINGKELKVEGQITYYNRYKRQNVVKDLSVELDRLSEESVNNDISSWTKGRSGEALSLLKKRFSHRPVQEKFVCLNCGFETHADEQAALNIARSWLFLRSQEYKKYQTNKTTGNTDKRAFVETWQSFYRKKLKEVWKPAV

SEQ ID NO: 218 - protein, 978 aa, synthetic construct
QEIKRINKIRRRLVKDSNTKKAGKTGPMKTLLVRVMTPDLRERLENLRKKPENIPQPISNTSRANLNKLLTDYTEMKKAILHVYWEEFQKDPVGLMSRVAQPASKKIDQNKLKPEMDEKGNLTTAGFACSQCGQPLFVYKLEQVSEKGKAYTNYFGRCNVAEHEKLILLAQLKPEKDSDEAVTYSLGKFGQRALDFYSIHVTKESTHPVKPLAQIAGNRYASGPVGKALSDACMGTIASFLSKYQDIIIEHQKVVKGNQKRLESLRELAGKENLEYPSVTLPPQPHTKEGVDAYNEVIARVRMWVNLNLWQKLKLSRDDAKPLLRLKGFPSFPLVERQANEVSWWDMVCNVKKLINEKKEDGKVFWQNLAGYKRQEALRPYLSSEEDRKKGKKFARYQLGDLLLHLEKKHGEDWGKVYDEAWERIDKKVEGLSKHIKLEEERRSEDAQSKAALTDWLRAKASFVIEGLKEADKDEFCRCELKLQKWYGDLRGKPFAIEAENSILDISGFSKQYNCAFIWQKDGVKKLNLYLIINYFKGGKLRFKKIKPEAFEANRFYTVINKKSGEIVPMEVNFNFDDPNLIILPLAFGKRQGREFIWNDLLSLETGSLKLANGRVIEKTLYNRRTRQDEPALFVALTFERREVLDSSNIKPMNLIGVDRGENIPAVIALTDPEGCPLSRFKDSLGNPTHILRIGESYKEKQRTIQAKKEVEQRRAGGYSRKYASKAKNLADDMVRNTARDLLYYAVTQDAMLIFENLSRGFGRQGKRTFMAERQYTRMEDWLTAKLAYEGLPSKTYLSKTLAQYTSKTCSNCGFTITSADYDRVLEKLKKTATGWMTTINGKELKVEGQITYYNRYKRQNVVKDLSVELDRLSEESVNNDISSWTKGRSGEALSLLKKRFSHRPVQEKFVCLNCGFETHADEQAALNIARSWLFLRSQEYKKYQTNKTTGNTDKRAFVETWQSFYRKKLKEVWKPAV

SEQ ID NO: 219 - protein, 978 aa, synthetic construct
QEIKRINKIRRRLVKDSNTKKAGKTGPMKTLLVRVMTPDLRERLENLRKKPENIPQPISNTSRANLNKLLTDYTEMKKAILHVYWEEFQKDPVGLMSRVAQPASKKIDQNKLKPEMDEKGNLTTAGFACSQCGQPLFVYKLEQVSEKGKAYTNYFGRCNVAEHEKLILLAQLKPEKDSDEAVTYSLGKFGQRALDFYSIHVTKESTHPVKPLAQIAGNRYASGPVGKALSDACMGTIASFLSKYQDIIIEHQKVVKGNQKRLESLRELAGKENLEYPSVTLPPQPHTKEGVDAYNEVIARVRMWVNLNLWQKLKLSRDDAKPLLRLKGFPSFPLVERQANEVDWWDMVCNVKKLINEKKEDGKVFWQNLAGYKRQEALRPYLSSEEDRKKGKKFARYQLGDLLLHLEKKHGEDWGKVYDEAWERIDKKVEGLSKHIKLEEERRSEDAQSKAALTDWLREKASFVIEGLKEADKDEFCRCELKLQKWYGDLRGKPFAIEAENSILDISGFSKQYNCAFIWQKDGVKKLNLYLIINYFKGGKLRFKKIKPEAFEANRFYTVINKKSGEIVPMEVNFNFDDPNLIILPLAFGKRQGREFIWNDLLSLETGSLKLANGRVIEKTLYNRRTRQDEPALFVALTFERREVLDSSNIKPMNLIGVDRGENIPAVIALTDPEGCPLSRFKDSLGNPTHILRIGESYKEKQRTIQAKKEVEQRRAGGYSRKYASKAKNLADDMVRNTARDLLYYAVTQDAMLIFENLSRGFGRQGKRTFMAERQYTRMEDWLTAKLAYEGLPSKTYLSKTLAQYTSKTCSNCGFTITSADYDRVLEKLKKTATGWMTTINGKELKVEGQITYYNRYKRQNVVKDLSVELDRLSEESVNNDISSWTKGRSGEALSLLKKRFSHRPVQEKFVCLNCGFETHADEQAALNIARSWLFLRSQEYKKYQTNKTTGNTDKRAFVETWQSFYRKKLKEVWKPAV

SEQ ID NO: 220 - protein, 978 aa, synthetic construct
QEIKRINKIRRRLVKDSNTKKAGKTGPMKTLLVRVMTPDLRERLENLRKKPENIPQPISNTSRANLNKLLTDYTEMKKAILHVYWEEFQKDPVGLMSRVAQPASKKIDQNKLKPEMDEKGNLTTAGFACSQCGQPLFVYKLEQVSEKGKAYTNYFGRCNVAEHEKLILLAQLKPEKDSDEAVTYSLGKFGQRALDFYSIHVTKESTHPVKPLAQIAGNRYASGPVGKALSDACMGTIASFLSKYQDIIIEHQKVVKGNQKRLESLRELAGKENLEYPSVTLPPQPHTKEGVDAYNEVIARVRMWVNLNLWQKLKLSRDDAKPLLRLKGFPSFPLVERQANEVDWWDMVCNVKKLINEKKEDGKVFWQNLAGYKRQEALRPYLSSEEDRKKGKKFARYQLGDLLLHLEKKHGEDWGKVYDEAWERIDKKVEGLSKHIKLEEERRSEDAQSKAALTDWLRAKASFVIEGLKEADKDEFCRCELKLQKWYGDLRGKPFAIEAENSILDISGFSKQYNCAFIWQKDGVKKLNLYLIINYFKGGKLRFKKIKPEAFEANRFYTVINKKSGEIVPMEVNFNFDDPNLIILPLAFGKRQGREFIWNDLLSLETGSLKLANGRVIEKTTYNRRTRQDEPALFVALTFERREVLDSSNIKPMNLIGVDRGENIPAVIALTDPEGCPLSRFKDSLGNPTHILRIGESYKEKQRTIQAKKEVEQRRAGGYSRKYASKAKNLADDMVRNTARDLLYYAVTQDAMLIFENLSRGFGRQGKRTFMAERQYTRMEDWLTAKLAYEGLPSKTYLSKTLAQYTSKTCSNCGFTITSADYDRVLEKLKKTATGWMTTINGKELKVEGQITYYNRYKRQNVVKDLSVELDRLSEESVNNDISSWTKGRSGEALSLLKKRFSHRPVQEKFVCLNCGFETHADEQAALNIARSWLFLRSQEYKKYQTNKTTGNTDKRAFVETWQSFYRKKLKEVWKPAV

SEQ ID NO: 221 - protein, 978 aa, synthetic construct
QEIKRINKIRRRLVKDSNTKKAGKTGPMKTLLVRVMTPDLRERLENLRKKPENIPQPISNTSRANLNKLLTDYTEMKKAILHVYWEEFQKDPVGLMSRVAQPASKKIDQNKLKPEMDEKGNLTTAGFACSQCGQPLFVYKLEQVSEKGKAYTNYFGRCNVAEHEKLILLAQLKPEKDSDEAVTYSLGKFGQRALDFYSIHVTKESTHPVKPLAQIAGNRYASGPVGKALSDACMGTIASFLSKYQDIIIEHQKVVKGNQKRLESLRELAGKENLEYPSVTLPPQPHTKEGVDAYNEVIARVRMWVNLNLWQKLKLSRDDAKPLLRLKGFPSFPLVERQANEVDWWDMVCNVKKLINEKKEDGKVFWQNLAGYKRQEANRPYLSSEEDRKKGKKFARYQLGDLLLHLEKKHGEDWGKVYDEAWERIDKKVEGLSKHIKLEEERRSEDAQSKAALTDWLRAKASFVIEGLKEADKDEFCRCELKLQKWYGDLRGKPFAIEAENSILDISGFSKQYNCAFIWQKDGVKKLNLYLIINYFKGGKLRFKKIKPEAFEANRFYTVINKKSGEIVPMEVNFNFDDPNLIILPLAFGKRQGREFIWNDLLSLETGSLKLANGRVIEKTLYNRRTRQDEPALFVALTFERREVLDSSNIKPMNLIGVDRGENIPAVIALTDPEGCPLSRFKDSLGNPTHILRIGESYKEKQRTIQAKKEVEQRRAGGYSRKYASKAKNLADDMVRNTARDLLYYAVTQDAMLIFENLSRGFGRQGKRTFMAERQYTRMEDWLTAKLAYEGLPSKTYLSKTLAQYTSKTCSNCGFTITSADYDRVLEKLKKTATGWMTTINGKELKVEGQITYYNRYKRQNVVKDLSVELDRLSEESVNNDISSWTKGRSGEALSLLKKRFSHRPVQEKFVCLNCGFETHADEQAALNIARSWLFLRSQEYKKYQTNKTTGNTDKRAFVETWQSFYRKKLKEVWKPAV

SEQ ID NO: 222 - protein, 978 aa, synthetic construct
QEIKRINKIRRRLVKDSNTKKAGKTGPMKTLLVRVMTPDLRERLENLRKKPENIPQPISNTSRANLNKLLTDYTEMKKAILHVYWEEFQKDPVGLMSRVAQPASKKIDQNKLKPEMDEKGNLTTAGFACSQCGQPLFVYKLEQVSEKGKAYTNYFGRCNVAEHEKLILLAQLKPEKDSDEAVTYSLGKFGQRALDFYSIHVTKESTHPVKPLAQIAGNRYASGPVGKALSDACMGTIASFLSKYQDIIIEHQKVVKGNQKRLESLRELAGKENLEYPSVTLPPQPHTKEGVDAYNEVIARVRMWVNLNLWQKLKLSRDDAKPLLRLKGFPSFPLVERQANEVDWWDMVCNVKKLINEKKEDGKVFWQNLAGYKRQEALRPYLSSEEDRKKGKKFARYQLGDLLLHLEKKHGEDWGKVYDEAWERIDKKVEGLSKHIKLEELRRSEDAQSKAALTDWLRAKASFVIEGLKEADKDEFCRCELKLQKWYGDLRGKPFAIEAENSILDISGFSKQYNCAFIWQKDGVKKLNLYLIINYFKGGKLRFKKIKPEAFEANRFYTVINKKSGEIVPMEVNFNFDDPNLIILPLAFGKRQGREFIWNDLLSLETGSLKLANGRVIEKTLYNRRTRQDEPALFVALTFERREVLDSSNIKPMNLIGVDRGENIPAVIALTDPEGCPLSRFKDSLGNPTHILRIGESYKEKQRTIQAKKEVEQRRAGGYSRKYASKAKNLADDMVRNTARDLLYYAVTQDAMLIFENLSRGFGRQGKRTFMAERQYTRMEDWLTAKLAYEGLPSKTYLSKTLAQYTSKTCSNCGFTITSADYDRVLEKLKKTATGWMTTINGKELKVEGQITYYNRYKRQNVVKDLSVELDRLSEESVNNDISSWTKGRSGEALSLLKKRFSHRPVQEKFVCLNCGFETHADEQAALNIARSWLFLRSQEYKKYQTNKTTGNTDKRAFVETWQSFYRKKLKEVWKPAV

SEQ ID NO: 223 - protein, 976 aa, synthetic construct
QEIKRINKIRRRLVKDSNTKKAGKTGPMKTLLVRVMTPDLRERLENLRKKPENIPQPISNTSRANLNKLLTDYTEMKKAILHVYWEEFQKDPVGLMSRVAQPASKKIDQNKLKPEMDEKGNLTTAGFACSQCGQPLFVYKLEQVSEKGKAYTNYFGRCNVAEHEKLILLAQLKPEKDSDEAVTYSLGKFGQRALDFYSIHVTKESTHPVKPLAQIAGNRYASGPVGKALSDACMGTIASFLSKYQDIIIEHQKVVKGNQKRLESLRELAGKENLEYPSVTLPPQPHTKEGVDAYNEVIARVRMWVNLNLWQKLKLSRDDAKPLLRLKGFPSFPLVERQANEVDWWDMVCNVKKLINEKKEDGKVFWQNLAGYKRQEALRPYLSSEEDRKKGKKFARYQLGDLLLHLEKKHGEDWGKVYDEAWERIDKKVEGLSKHIKLEEERRSEDAQSKAALTDWLRAKASFVIEGLKEADKDERCELKLQKWYGDLRGKPFAIEAENSILDISGFSKQYNCAFIWQKDGVKKLNLYLIINYFKGGKLRFKKIKPEAFEANRFYTVINKKSGEIVPMEVNFNFDDPNLIILPLAFGKRQGREFIWNDLLSLETGSLKLANGRVIEKTLYNRRTRQDEPALFVALTFERREVLDSSNIKPMNLIGVDRGENIPAVIALTDPEGCPLSRFKDSLGNPTHILRIGESYKEKQRTIQAKKEVEQRRAGGYSRKYASKAKNLADDMVRNTARDLLYYAVTQDAMLIFENLSRGFGRQGKRTFMAERQYTRMEDWLTAKLAYEGLPSKTYLSKTLAQYTSKTCSNCGFTITSADYDRVLEKLKKTATGWMTTINGKELKVEGQITYYNRYKRQNVVKDLSVELDRLSEESVNNDISSWTKGRSGEALSLLKKRFSHRPVQEKFVCLNCGFETHADEQAALNIARSWLFLRSQEYKKYQTNKTTGNTDKRAFVETWQSFYRKKLKEVWKPAV

SEQ ID NO: 224 - protein, 976 aa, synthetic construct
QEIKRINKIRRRLVKDSNTKKAGKTGPMKTLLVRVMTPDLRERLENLRKKPENIPQPISNTSRANLNKLLTDYTEMKKAILHVYWEEFQKDPVGLMSRVAQPASKKIDQNKLKPEMDEKGNLTTAGFACSQCGQPLFVYKLEQVSEKGKAYTNYFGRCNVAEHEKLILLAQLKPEKDSDEAVTYSLGKFGQRALDFYSIHVTKESTHPVKPLAQIAGNRYASGPVGKALSDACMGTIASFLSKYQDIIIEHQKVVKGNQKRLESLRELAGKENLEYPSVTLPPQPHTKEGVDAYNEVIARVRMWVNLNLWQKLKLSRDDAKPLLRLKGFPSFPLVERQANEVDWWDMVCNVKKLINEKKEDGKVFWQNLAGYKRALRPYLSSEEDRKKGKKFARYQLGDLLLHLEKKHGEDWGKVYDEAWERIDKKVEGLSKHIKLEEERRSEDAQSKAALTDWLRAKASFVIEGLKEADKDEFCRCELKLQKWYGDLRGKPFAIEAENSILDISGFSKQYNCAFIWQKDGVKKLNLYLIINYFKGGKLRFKKIKPEAFEANRFYTVINKKSGEIVPMEVNFNFDDPNLIILPLAFGKRQGREFIWNDLLSLETGSLKLANGRVIEKTLYNRRTRQDEPALFVALTFERREVLDSSNIKPMNLIGVDRGENIPAVIALTDPEGCPLSRFKDSLGNPTHILRIGESYKEKQRTIQAKKEVEQRRAGGYSRKYASKAKNLADDMVRNTARDLLYYAVTQDAMLIFENLSRGFGRQGKRTFMAERQYTRMEDWLTAKLAYEGLPSKTYLSKTLAQYTSKTCSNCGFTITSADYDRVLEKLKKTATGWMTTINGKELKVEGQITYYNRYKRQNVVKDLSVELDRLSEESVNNDISSWTKGRSGEALSLLKKRFSHRPVQEKFVCLNCGFETHADEQAALNIARSWLFLRSQEYKKYQTNKTTGNTDKRAFVETWQSFYRKKLKEVWKPAV

SEQ ID NO: 225 - protein, 978 aa, synthetic construct
QEIKRINKIRRRLVKDSNTKKAGKTGPMKTLLVRVMTPDLRERLENLRKKPENIPQPISNTSRANLNKLLTDYTEMKKAILHVYWEEFQKDPVGLMSRVAQPASKKIDQNKLKPEMDEKGNLTTAGFACSQCGQPLFVYKLEQVSEKGKAYTNYFGRCNVAEHEKLILLAQLKPEKDSDEAVTYSLGKFGQRALDFYSIHVTKESTHPVKPLAQIAGNRYASGPVGKALSDACMGTIASFLSKYQDIIIEHQKVVKGNQKRLESLRELAGKENLEYPSVTLPPQPHTKEGVDAYNEVIARVRMWVNLNLWQKLKLSRDDAKPLLRLKGFPSFPLVERQANEVDWWDMVCNVKKLINEKKEDGKVFWQNLAGYKRQEALRPYLSSEEDRQKGKKFARYQLGDLLLHLEKKHGEDWGKVYDEAWERIDKKVEGLSKHIKLEEERRSEDAQSKAALTDWLRAKASFVIEGLKEADKDEFCRCELKLQKWYGDLRGKPFAIEAENSILDISGFSKQYNCAFIWQKDGVKKLNLYLIINYFKGGKLRFKKIKPEAFEANRFYTVINKKSGEIVPMEVNFNFDDPNLIILPLAFGKRQGREFIWNDLLSLETGSLKLANGRVIEKTLYNRRTRQDEPALFVALTFERREVLDSSNIKPMNLIGVDRGENIPAVIALTDPEGCPLSRFKDSLGNPTHILRIGESYKEKQRTIQAKKEVEQRRAGGYSRKYASKAKNLADDMVRNTARDLLYYAVTQDAMLIFENLSRGFGRQGKRTFMAERQYTRMEDWLTAKLAYEGLPSKTYLSKTLAQYTSKTCSNCGFTITSADYDRVLEKLKKTATGWMTTINGKELKVEGQITYYNRYKRQNVVKDLSVELDRLSEESVNNDISSWTKGRSGEALSLLKKRFSHRPVQEKFVCLNCGFETHADEQAALNIARSWLFLRSQEYKKYQTNKTTGNTDKRAFVETWQSFYRKKLKEVWKPAV

SEQ ID NO: 226 - protein, 978 aa, synthetic construct
QEIKRLNKIRRRLVKDSNTKKAGKTGPMKTLLVRVMTPDLRERLENLRKKPENIPQPISNTSRANLNKLLTDYTEMKKAILHVYWEEFQKDPVGLMSRVAQPASKKIDQNKLKPEMDEKGNLTTAGFACSQCGQPLFVYKLEQVSEKGKAYTNYFGRCNVAEHEKLILLAQLKPEKDSDEAVTYSLGKFGQRALDFYSIHVTKESTHPVKPLAQIAGNRYASGPVGKALSDACMGTIASFLSKYQDIIIEHQKVVKGNQKRLESLRELAGKENLEYPSVTLPPQPHTKEGVDAYNEVIARVRMWVNLNLWQKLKLSRDDAKPLLRLKGFPSFPLVERQANEVDWWDMVCNVKKLINEKKEDGKVFWQNLAGYKRQEALRPYLSSEEDRKKGKKFARYQLGDLLLHLEKKHGEDWGKVYDEAWERIDKKVEGLSKHIKLEEERRSEDAQSKAALTDWLRAKASFVIEGLKEADKDEFCRCELKLQKWYGDLRGKPFAIEAENSILDISGFSKQYNCAFIWQKDGVKKLNLYLIINYFKGGKLRFKKIKPEAFEANRFYTVINKKSGEIVPMEVNFNFDDPNLIILPLAFGKRQGREFIWNDLLSLETGSLKLANGRVIEKTLYNRRTRQDEPALFVALTFERREVLDSSNIKPMNLIGVDRGENIPAVIALTDPEGCPLSRFKDSLGNPTHILRIGESYKEKQRTIQAKKEVEQRRAGGYSRKYASKAKNLADDMVRNTARDLLYYAVTQDAMLIFENLSRGFGRQGKRTFMAERQYTRMEDWLTAKLAYEGLPSKTYLSKTLAQYTSKTCSNCGFTITSADYDRVLEKLKKTATGWMTTINGKELKVEGQITYYNRYKRQNVVKDLSVELDRLSEESVNNDISSWTKGRSGEALSLLKKRFSHRPVQEKFVCLNCGFETHADEQAALNIARSWLFLRSQEYKKYQTNKTTGNTDKRAFVETWQSFYRKKLKEVWKPAV

SEQ ID NO: 227 - protein, 978 aa, synthetic construct
QEIKRINKIRRRLVKDSNTKKAGKTGPMKTLLVRVMTPDLRERLENLRKKPENIPQPISNTSRANLNKLLTDYTEMKKAILHVYWEEFQKDPVGLMSRVAQPASKKIDQNKLKPEMDEKGNLTTAGFACSQCGQPLFVYKLEQVSEKGKAYTNYFGRCNVAEHEKLILLAQLKPEKDSDEAVTYSLGKFGQRALDFYSIHVTKESTHPVKPLAQIAGNRYASGPVGKALSDACMGTIASFLSKYQDIIIEHQKVVKGNQKRLESLRELAGKENLEYPSVTLPPQPHTKEGVDAYNEVIARVRMWVNLNLWQKLKLSRDDAKPLLRLKGFPSFPLVERQANEVDWWDMVCNVKKLINEKKEDGKVFWQNLAGYKRQEALRPYLSSEEDRKKGKKFARYQLGDLLLHLEKKHGEDWGKVYDEAWERIDKKVEGLSKHIKLEEERRSEDAQSKAALTDWLDAKASFVIEGLKEADKDEFCRCELKLQKWYGDLRGKPFAIEAENSILDISGFSKQYNCAFIWQKDGVKKLNLYLIINYFKGGKLRFKKIKPEAFEANRFYTVINKKSGEIVPMEVNFNFDDPNLIILPLAFGKRQGREFIWNDLLSLETGSLKLANGRVIEKTLYNRRTRQDEPALFVALTFERREVLDSSNIKPMNLIGVDRGENIPAVIALTDPEGCPLSRFKDSLGNPTHILRIGESYKEKQRTIQAKKEVEQRRAGGYSRKYASKAKNLADDMVRNTARDLLYYAVTQDAMLIFENLSRGFGRQGKRTFMAERQYTRMEDWLTAKLAYEGLPSKTYLSKTLAQYTSKTCSNCGFTITSADYDRVLEKLKKTATGWMTTINGKELKVEGQITYYNRYKRQNVVKDLSVELDRLSEESVNNDISSWTKGRSGEALSLLKKRFSHRPVQEKFVCLNCGFETHADEQAALNIARSWLFLRSQEYKKYQTNKTTGNTDKRAFVETWQSFYRKKLKEVWKPAV

SEQ ID NO: 228 - protein, 976 aa, synthetic construct
QEIKRINKIRRRLVKDSNTKKAGKTGPMKTLLVRVMTPDLRERLENLRKKPENIPQPISNTSRANLNKLLTDYTEMKKAILHVYWEEFQKDPVGLMSRVAQPASKKIDQNKLKPEMDEKGNLTTAGFACSQCGQPLFVYKLEQVSEKGKAYTNYFGRCNVAEHEKLILLAQLKPEKDSDEAVTYSLGKFGQRALDFYSIHVTKESTHPVKPLAQIAGNRYASGPVGKALSDACMGTIASFLSKYQDIIIEHQKVVKGNQKRLESLRELAGKENLEYPSVTLPPQPHTKEGVDAYNEVIARVRMWVNLNLWQKLKLSRDDAKPLLRLKGFPSFPLVERQANEVDWWDMVCNVKKLINEKKEDGKVFWQNLAGYKRQEALRPYLSSEEDRKKGKKFARYQLGDLLLHLEKKHGEDWGKVYDEAWERIDKKVEGLSKHIKLEEERRSEDAQSKAALTDWLRAKASFVIEGLKEADKDEFCRCELKLQKWYGDLRGKPFAIEAENSDISGFSKQYNCAFIWQKDGVKKLNLYLIINYFKGGKLRFKKIKPEAFEANRFYTVINKKSGEIVPMEVNFNFDDPNLIILPLAFGKRQGREFIWNDLLSLETGSLKLANGRVIEKTLYNRRTRQDEPALFVALTFERREVLDSSNIKPMNLIGVDRGENIPAVIALTDPEGCPLSRFKDSLGNPTHILRIGESYKEKQRTIQAKKEVEQRRAGGYSRKYASKAKNLADDMVRNTARDLLYYAVTQDAMLIFENLSRGFGRQGKRTFMAERQYTRMEDWLTAKLAYEGLPSKTYLSKTLAQYTSKTCSNCGFTITSADYDRVLEKLKKTATGWMTTINGKELKVEGQITYYNRYKRQNVVKDLSVELDRLSEESVNNDISSWTKGRSGEALSLLKKRFSHRPVQEKFVCLNCGFETHADEQAALNIARSWLFLRSQEYKKYQTNKTTGNTDKRAFVETWQSFYRKKLKEVWKPAV

SEQ ID NO: 229 - protein, 978 aa, synthetic construct
QEIKRINKIRRRLVKDSNTKKAGKTGPMKTLLVRVMTPDLRERLENLRKKPENIPQPISNTSRANLNKLLTDYTEMKKAILHVYWEEFQKDPVGLMSRVAQPASKKIDQNKLKPEMDEKGNLTTAGFACSQCGQPLFVYKLEQVSEKGKAYTNYVGRCNVAEHEKLILLAQLKPEKDSDEAVTYSLGKFGQRALDFYSIHVTKESTHPVKPLAQIAGNRYASGPVGKALSDACMGTIASFLSKYQDIIIEHQKVVKGNQKRLESLRELAGKENLEYPSVTLPPQPHTKEGVDAYNEVIARVRMWVNLNLWQKLKLSRDDAKPLLRLKGFPSFPLVERQANEVDWWDMVCNVKKLINEKKEDGKVFWQNLAGYKRQEALRPYLSSEEDRKKGKKFARYQLGDLLLHLEKKHGEDWGKVYDEAWERIDKKVEGLSKHIKLEEERRSEDAQSKAALTDWLRAKASFVIEGLKEADKDEFCRCELKLQKWYGDLRGKPFAIEAENSILDISGFSKQYNCAFIWQKDGVKKLNLYLIINYFKGGKLRFKKIKPEAFEANRFYTVINKKSGEIVPMEVNFNFDDPNLIILPLAFGKRQGREFIWNDLLSLETGSLKLANGRVIEKTLYNRRTRQDEPALFVALTFERREVLDSSNIKPMNLIGVDRGENIPAVIALTDPEGCPLSRFKDSLGNPTHILRIGESYKEKQRTIQAKKEVEQRRAGGYSRKYASKAKNLADDMVRNTARDLLYYAVTQDAMLIFENLSRGFGRQGKRTFMAERQYTRMEDWLTAKLAYEGLPSKTYLSKTLAQYTSKTCSNCGFTITSADYDRVLEKLKKTATGWMTTINGKELKVEGQITYYNRYKRQNVVKDLSVELDRLSEESVNNDISSWTKGRSGEALSLLKKRFSHRPVQEKFVCLNCGFETHADEQAALNIARSWLFLRSQEYKKYQTNKTTGNTDKRAFVETWQSFYRKKLKEVWKPAV

SEQ ID NO: 230 - protein, 979 aa, synthetic construct
QEIKRINKIRRRLVKDSNTKKAGKTGPMKTLLVRVMTPDLRERLENLRKKPENIPQPISNTSRANLNKLLTDYTEMKKAILHVYWEEFQKDPVGLMSRVAQPASKKIDQNKLKPEMDEKGNLTTAGFACSQCGQPLFVYKLEQVSEKGKAYTNYFGRCNVAEHEKLILLAQLKPEKDSDEAVTYSLGKFGQRALDFYSIHVTKESTHPVKPLAQIAGNRYASGPVGKALSDACMGTIASFLSKYQDIIIEHQKVVKGNQKRLESLRELAGKENLEYPSVTLPPQPHTKEGVDAYNEVIARVRMWVNLNLWQKLKLSRDDAKPLLRLKGFPSFPLVERQANEVDWWDMVCNVKKLINGEKKEDGKVFWQNLAGYKRQEALRPYLSSEEDRKKGKKFARYQLGDLLLHLEKKHGEDWGKVYDEAWERIDKKVEGLSKHIKLEEERRSEDAQSKAALTDWLRAKASFVIEGLKEADKDEFCRCELKLQKWYGDLRGKPFAIEAENSILDISGFSKQYNCAFIWQKDGVKKLNLYLIINYFKGGKLRFKKIKPEAFEANRFYTVINKKSGEIVPMEVNFNFDDPNLIILPLAFGKRQGREFIWNDLLSLETGSLKLANGRVIEKTLYNRRTRQDEPALFVALTFERREVLDSSNIKPMNLIGVDRGENIPAVIALTDPEGCPLSRFKDSLGNPTHILRIGESYKEKQRTIQAKKEVEQRRAGGYSRKYASKAKNLADDMVRNTARDLLYYAVTQDAMLIFENLSRGFGRQGKRTFMAERQYTRMEDWLTAKLAYEGLPSKTYLSKTLAQYTSKTCSNCGFTITSADYDRVLEKLKKTATGWMTTINGKELKVEGQITYYNRYKRQNVVKDLSVELDRLSEESVNNDISSWTKGRSGEALSLLKKRFSHRPVQEKFVCLNCGFETHADEQAALNIARSWLFLRSQEYKKYQTNKTTGNTDKRAFVETWQSFYRKKLKEVWKPAV

SEQ ID NO: 231 - protein, 978 aa, synthetic construct
QEIKRINKIRRRLVKDSNTKKAGKTGPMKTLLVRVMTPDLRERLENLRKKPENIPQPISNTSRANLNKLLTDYTEMKKAILHVYWEEFQKDPVGLMSRVAQPASKKIDQNKLKPEMDEKGNLTTAGFACSQCGQPLFVYKLEQVSEKGKAYTNYFGRCNVAEHEKLILLAQLKPEKDSDEAVTYSLGKFGQRALDFYSIHVTKESTHPVKPLAQIAGNRFASGPVGKALSDACMGTIASFLSKYQDIIIEHQKVVKGNQKRLESLRELAGKENLEYPSVTLPPQPHTKEGVDAYNEVIARVRMWVNLNLWQKLKLSRDDAKPLLRLKGFPSFPLVERQANEVDWWDMVCNVKKLINEKKEDGKVFWQNLAGYKRQEALRPYLSSEEDRKKGKKFARYQLGDLLLHLEKKHGEDWGKVYDEAWERIDKKVEGLSKHIKLEEERRSEDAQSKAALTDWLRAKASFVIEGLKEADKDEFCRCELKLQKWYGDLRGKPFAIEAENSILDISGFSKQYNCAFIWQKDGVKKLNLYLIINYFKGGKLRFKKIKPEAFEANRFYTVINKKSGEIVPMEVNFNFDDPNLIILPLAFGKRQGREFIWNDLLSLETGSLKLANGRVIEKTLYNRRTRQDEPALFVALTFERREVLDSSNIKPMNLIGVDRGENIPAVIALTDPEGCPLSRFKDSLGNPTHILRIGESYKEKQRTIQAKKEVEQRRAGGYSRKYASKAKNLADDMVRNTARDLLYYAVTQDAMLIFENLSRGFGRQGKRTFMAERQYTRMEDWLTAKLAYEGLPSKTYLSKTLAQYTSKTCSNCGFTITSADYDRVLEKLKKTATGWMTTINGKELKVEGQITYYNRYKRQNVVKDLSVELDRLSEESVNNDISSWTKGRSGEALSLLKKRFSHRPVQEKFVCLNCGFETHADEQAALNIARSWLFLRSQEYKKYQTNKTTGNTDKRAFVETWQSFYRKKLKEVWKPAV

SEQ ID NO: 232 - protein, 978 aa, synthetic construct
QEIKRINKIRRRLVKDSNTKKAGKTGPMKTLLVRVMTPDLRERLENLRKKPENIPQPISNTSRANLNKLLTDYTEMKKAILHVYWEEFQKDPVGLMSRVAQPASKKIDQNKLKPEMDEKGNLTTAGFACSQCGQPLFVYKLEQVSEKGKAYTNYFGRCNVAEHEKLILLAQLKPEKDSDEAVTYSLGKFGQRALDFYSIHVTKESTHPVKPLAQIAGNRYASGPVGKALSDACMGTIASFLSKYQDIIIEHQKVVKGNQKRLESLRELAGKENLEYPSVTLPPQPHTKEGVDAYNEVIARVRMWVNLNLWQKLKLSRDDAKPLLRLKGFPSFPLVERQANEVDWWDMVCNVKKLINEKKEDGKVFWQNLAGYKRQEALRPYLSSEEDRKKGKKFARYQLGDLLLHLEKKHGEDWGKVYDEAWERIDKKVEGLSKHIKLEEERRSEDAQSKAALTDWLRAKASFVIEGLKEADKDEFCRCELKLQKWYGDLRGKPFAIEAENSILDISGFSKQYNCAFIWQKDGVKKLNLYLIINYFKGGKLRFKKIKPEAFEANRFYTVINKKSGEIVPMEVNFNFDDPNLIILPLAFGKRQGREFIWNDLLSLETGSLKLANGRVIEKTLYNRRTRQDEPALFVALTFERREVLDSSNIKPMNLIGVDRGENIPAVIALTDPEGCPLSRFKDSLGNPTHILRIGESYKEKQRTIQAKKEVEQRRAGGYSRKYASKAKNLADDMVRNTARDLLYYAVTQDAMLIFENLSRGFGRQGKRTFMAERQYTRMEDWYTAKLAYEGLPSKTYLSKTLAQYTSKTCSNCGFTITSADYDRVLEKLKKTATGWMTTINGKELKVEGQITYYNRYKRQNVVKDLSVELDRLSEESVNNDISSWTKGRSGEALSLLKKRFSHRPVQEKFVCLNCGFETHADEQAALNIARSWLFLRSQEYKKYQTNKTTGNTDKRAFVETWQSFYRKKLKEVWKPAV

SEQ ID NO: 233 - protein, 979 aa, synthetic construct
QEIKRINKIRRRLVKDSNTKKAGKTGPMKTLLVRVMTPDLRERLENLRKKPENIPQPISNTSRANLNKLLTDYTEMKKAILHVYWEEFQKDPVGLMSRVAQPASKKIDQNKLKPEMDEKGNLTTAGFACSQCGQPLFVYKLEQVSEKGKAYTNYFGRCNVAEHEKLILLAQLKPEKDSDEAVTYSLGKFGQRALDFYSIHVTKESTHPVKPLAQIAGNRYASGPVGKALSDACMGTIASFLSKYQDIIIEHQKVVKGNQKRLESLRELAGKENLEYPSVTLPPQPHTKEGVDAYNEVIARVRMWVNLNLWQKLKLSRDDAKPLLRLKGFPSFPLVERQANEVDWWDMVPCNVKKLINEKKEDGKVFWQNLAGYKRQEALRPYLSSEEDRKKGKKFARYQLGDLLLHLEKKHGEDWGKVYDEAWERIDKKVEGLSKHIKLEEERRSEDAQSKAALTDWLRAKASFVIEGLKEADKDEFCRCELKLQKWYGDLRGKPFAIEAENSILDISGFSKQYNCAFIWQKDGVKKLNLYLIINYFKGGKLRFKKIKPEAFEANRFYTVINKKSGEIVPMEVNFNFDDPNLIILPLAFGKRQGREFIWNDLLSLETGSLKLANGRVIEKTLYNRRTRQDEPALFVALTFERREVLDSSNIKPMNLIGVDRGENIPAVIALTDPEGCPLSRFKDSLGNPTHILRIGESYKEKQRTIQAKKEVEQRRAGGYSRKYASKAKNLADDMVRNTARDLLYYAVTQDAMLIFENLSRGFGRQGKRTFMAERQYTRMEDWLTAKLAYEGLPSKTYLSKTLAQYTSKTCSNCGFTITSADYDRVLEKLKKTATGWMTTINGKELKVEGQITYYNRYKRQNVVKDLSVELDRLSEESVNNDISSWTKGRSGEALSLLKKRFSHRPVQEKFVCLNCGFETHADEQAALNIARSWLFLRSQEYKKYQTNKTTGNTDKRAFVETWQSFYRKKLKEVWKPAV

SEQ ID NO: 234 - protein, 979 aa, synthetic construct
QEIKRINKIRRRLVKDSNTKKAGKTGPMKTLLVRVMTPDLRERLENLRKKPENIPQPISNTSRANLNKLLTDYTEMKKAILHVYWEEFQKDPVGLMSRVAQPASKKIDQNKLKPEMDEKGNLTTAGFACSQCGQPLFVYKLEQVSEKGKAYTNYFGRCNVAEHEKLILLAQLKPEKDSDEAVTYSLGKFGQRALDFYSIHVTKESTHPVKPLAQTIAGNRYASGPVGKALSDACMGTIASFLSKYQDIIIEHQKVVKGNQKRLESLRELAGKENLEYPSVTLPPQPHTKEGVDAYNEVIARVRMWVNLNLWQKLKLSRDDAKPLLRLKGFPSFPLVERQANEVDWWDMVCNVKKLINEKKEDGKVFWQNLAGYKRQEALRPYLSSEEDRKKGKKFARYQLGDLLLHLEKKHGEDWGKVYDEAWERIDKKVEGLSKHIKLEEERRSEDAQSKAALTDWLRAKASFVIEGLKEADKDEFCRCELKLQKWYGDLRGKPFAIEAENSILDISGFSKQYNCAFIWQKDGVKKLNLYLIINYFKGGKLRFKKIKPEAFEANRFYTVINKKSGEIVPMEVNFNFDDPNLIILPLAFGKRQGREFIWNDLLSLETGSLKLANGRVIEKTLYNRRTRQDEPALFVALTFERREVLDSSNIKPMNLIGVDRGENIPAVIALTDPEGCPLSRFKDSLGNPTHILRIGESYKEKQRTIQAKKEVEQRRAGGYSRKYASKAKNLADDMVRNTARDLLYYAVTQDAMLIFENLSRGFGRQGKRTFMAERQYTRMEDWLTAKLAYEGLPSKTYLSKTLAQYTSKTCSNCGFTITSADYDRVLEKLKKTATGWMTTINGKELKVEGQITYYNRYKRQNVVKDLSVELDRLSEESVNNDISSWTKGRSGEALSLLKKRFSHRPVQEKFVCLNCGFETHADEQAALNIARSWLFLRSQEYKKYQTNKTTGNTDKRAFVETWQSFYRKKLKEVWKPAV

SEQ ID NO: 235 - protein, 978 aa, synthetic construct
QEIKRINKIRRRLVKDSNTKKAGKTGPMKTLLVRVMTPDLRERLENLRKKPENIPQPISNTSRANLNKLLTDYTEMKKAILHVYWEEFQKDPVGLMSRVAQPASKKIDQNKLKPEMDEKGNLTTAGFACSQCGQPLFVYKLEQVSEKGKAYTNYFGRCNVAEHEKLILLAQLKPEKDSDEAVTYSLGKFGQRALDFYSIHVTKESTHPVKPLAQIAGNRYASGPVGKALSDACMGTIASFLSKYQDIIIEHQKVVKGNQKRLESLRELAGKENLEYPSVTLPPQPHTKEGVDAYNEVIARVRMWVNLNLWQKLKLSRDDAKPLLRLKGFPSFPLVERQANEVDWWDMVCNVKKLINEKKEDGKVFWQNLAGYKRQEALRPYLSSEEDRKKGKKFARYQLGDLLLHLEKKHGEDWGKVYDEAWERIDKKVEGLSKHIKLEEERRSEDAQSKAALTDWLRAKASFVIEGLKEADKDEFCRCELKLQKWYGDLRGKPFAIEAENSILDISGFSKQYNCAFIWQKDGVKKLNLYLIINYFKGGKLRFKKIKPEAFEANRFYTVINKKSGEIVPMEVNFNFDDPNLIILPLAFGKRQGREFIWNDLLSLETGSLKLANGRVIEKTLYNRRTRQDEPALFVALTFERREVLDSSNIKPMNLIGVDRGENIPAVIALTDPEGCPLSRFKDSLGNPTHILRIGESYKEKQRTIQAKKEVEQRRAGGYSRKYASKAKNLADDMVRNTARDLLYYAVTQDAMLIFENLSRGFGRQGKRTFMAERQYTRMEDWLTAKLAYEGLPSKTYLSKTLAQYTSKTCSNCGFTITSADYDRVLEKLKKTATGWMTTINGKELKVEGQITYYNRYKRQNVVKDLSVELDRLSEESVNNDISSWTKGRSGEALSLLKKRFSHRPCQEKFVCLNCGFETHADEQAALNIARSWLFLRSQEYKKYQTNKTTGNTDKRAFVETWQSFYRKKLKEVWKPAV

SEQ ID NO: 236 - protein, 979 aa, synthetic construct
QEIKRINKIRRRLVKDSNTKKAGKTGPMKTLLVRVMTPDLRERLENLPRKKPENIPQPISNTSRANLNKLLTDYTEMKKAILHVYWEEFQKDPVGLMSRVAQPASKKIDQNKLKPEMDEKGNLTTAGFACSQCGQPLFVYKLEQVSEKGKAYTNYFGRCNVAEHEKLILLAQLKPEKDSDEAVTYSLGKFGQRALDFYSIHVTKESTHPVKPLAQIAGNRYASGPVGKALSDACMGTIASFLSKYQDIIIEHQKVVKGNQKRLESLRELAGKENLEYPSVTLPPQPHTKEGVDAYNEVIARVRMWVNLNLWQKLKLSRDDAKPLLRLKGFPSFPLVERQANEVDWWDMVCNVKKLINEKKEDGKVFWQNLAGYKRQEALRPYLSSEEDRKKGKKFARYQLGDLLLHLEKKHGEDWGKVYDEAWERIDKKVEGLSKHIKLEEERRSEDAQSKAALTDWLRAKASFVIEGLKEADKDEFCRCELKLQKWYGDLRGKPFAIEAENSILDISGFSKQYNCAFIWQKDGVKKLNLYLIINYFKGGKLRFKKIKPEAFEANRFYTVINKKSGEIVPMEVNFNFDDPNLIILPLAFGKRQGREFIWNDLLSLETGSLKLANGRVIEKTLYNRRTRQDEPALFVALTFERREVLDSSNIKPMNLIGVDRGENIPAVIALTDPEGCPLSRFKDSLGNPTHILRIGESYKEKQRTIQAKKEVEQRRAGGYSRKYASKAKNLADDMVRNTARDLLYYAVTQDAMLIFENLSRGFGRQGKRTFMAERQYTRMEDWLTAKLAYEGLPSKTYLSKTLAQYTSKTCSNCGFTITSADYDRVLEKLKKTATGWMTTINGKELKVEGQITYYNRYKRQNVVKDLSVELDRLSEESVNNDISSWTKGRSGEALSLLKKRFSHRPVQEKFVCLNCGFETHADEQAALNIARSWLFLRSQEYKKYQTNKTTGNTDKRAFVETWQSFYRKKLKEVWKPAV

SEQ ID NO: 237 - protein, 978 aa, synthetic construct
QEIKRINKIRRRLVKDSNTKKAGKTGPMKTLLVRVMTPDLRERLENLRKKPENIPQPISNTSRANLNKLLTDYTEMKKAILHVYWEEFQKDPVGLMSRVAQPASKKIDQNKLKPEMDEKGNLTTAGFACSQCGQPLFVYKLEQVSEKGKAYTNYFGRCNVAEHEKLILLAQLKPEKDSDEAVTYSLGKFGQRALDFYSIHVTKESTHPVKPLAQIAGNRYASGPVGKALSDACMGTIASFLSKYQDIIIEHQKVVKGNQKRLESLRELAGKENLEYPSVTLPPQPHTKEGVDAYNEVIARVRMWVNLNLWQKLKLSRDDAKPLLRLKGFPSFPLVERQANEVDWWDMVCNVKKLINEKKEDGKVFWQNLAGYKRQEALRPYLSSEEDRKKGKKFARYQLGDLLLHLEKKHGEDWGKVYDEAWERIDKKVEGLSKHIKLEEERRSEDAQSKAALTDWLRAKASFVIEGLKEADKDEFCRCELKLQKWYGDLRGKPFAIEAENSILDISGFSKQYNCAFIWQKDGVKKLNLYLIINYFKGGKLRFKKIKPEAFEANRFYTVINKKSGEIVPMEVNFNFDDPNLIILPLAFGKRQGREFIWNDLLSLETGSLKLANGRVIEKTLYNRRTRQDEPALFVALTFERREVLDSSNIKPMNLIGVDRGENIPAVIALTDPEGCPLSRFKDSLGNPTHILRIGESYKEKQRTIQAKKEVEQRRAGGYSRKYASKAKNLADDMVRNTARDLLYYAVTQDAMLIFENLSRGFGRQGKRTFMAERQYTRMEDWLTAKLAYEGLPSKTYLSKTLAQYTSKTCSNCGFTITSADYDRVLEGLKKTATGWMTTINGKELKVEGQITYYNRYKRQNVVKDLSVELDRLSEESVNNDISSWTKGRSGEALSLLKKRFSHRPVQEKFVCLNCGFETHADEQAALNIARSWLFLRSQEYKKYQTNKTTGNTDKRAFVETWQSFYRKKLKEVWKPAV

SEQ ID NO: 238 - protein, 977 aa, synthetic construct
QEIKRINKIRRRLVKDSNTKKAGKTGPMKTLLVRVMTPDLRERLENLRKKPENIPQPISNTSRANLNKLLTDYTEMKKAILHVYWEEFQKDPVGLMSRVAQPASKKIDQNKLKPEMDEKGNLTTAGFACSQCGQPLFVYKLEQVSEKGKAYTNYFGRCNVAEHEKLILLAQLKPEKDSDEAVTYSLGKFGQRALDFYSIHVTKESTHPVKPLAQIAGNRYASGPVGKALSDACMGTIASFLSKYQDIIIEHQKVVKGNQKRLESLRELAGKENLEYPSVTLPPQPHTKEGVDAYNEVIARVRMWVNLNLWQKLKLSRDDAKPLLRLKGFPSFPLVERQANEVDWWDMVCNVKKLINEKKEDGKVFWQNLAGYKRQEALRPYLSSEEDRKKGKKFARYQLGDLLLHLEKKHGEDWGKVYDEAWERIDKKVEGLSKHIKLEEERRSEDAQSKAALTDWLRAKASFVIEGLKEADKDEFCRCELKLQKWYGDLRGKPFAIEAENSILDISGFSKQYNCAFIWQKDGVKKLNLYLIINYFKGGKLRFKKIKPEAFEANRFYTVINKKSGEIVPMEVNFNFDDPNLIILPLAFGKRQGREFIWNDLLSLETGSLKLANGRVIEKTLYNRRTRQDEPALFVALTFERREVLDSSNIKPMNLIGVDRGENIPAVIALTDPEGCPLSRFKDSLGNPTHILRIGESYKEKQRTIQAKKEVEQRRAGGYSRKYASKAKNLADDMVRNTARDLLYYAVTQDAMLIFENLSRGFGRQGKRTFMAERQYTRMEDWLTAKLAYEGLPSKTYLSKTLAQTSKTCSNCGFTITSADYDRVLEKLKKTATGWMTTINGKELKVEGQITYYNRYKRQNVVKDLSVELDRLSEESVNNDISSWTKGRSGEALSLLKKRFSHRPVQEKFVCLNCGFETHADEQAALNIARSWLFLRSQEYKKYQTNKTTGNTDKRAFVETWQSFYRKKLKEVWKPAV

SEQ ID NO: 239 - protein, 979 aa, synthetic construct
QEIKRINKIRRRLVKDSNTKKAGKTGPMKTLLVRVMTPDLRERLENLRKKPENIPQPISNTSRANLNKLLTDYTEMKKAILHVYWEEFQKDPVGLMSRVAQPASKKIDQNKLKPEMDEKGNLTTAGFACSQCGQPLFVYKLEQVSEKGKAYTNYFGRCNVAEHEKLILLAQLKPEKDSDEAVTYSLGKFGQRALDFYSIHVTKESTHPVKPLAQIAGNRYASGPVGKALSDACMGTIASFLSKYQDIIIEHQKVVKGNQKRLESLRELAGKENLEYPSVTLPPQPHTKEGVDAYNEVIARVRMWVNLNLWQKLKLSRDDAKPLLRLKGFPSFPLVERQANEVDWWDMVCNVKKLINEKKEDGKVFWQNLAGYKRQEALRPYLSSEEDRKKGKKFARYQLGDLLLHLEKKHGEDWGKVYDEAWERIDKKVEGLSKHIKLEEERRSEDAQSKAALTDWLRAKASFVIEGLKEADKDEFCRCELKLQKWYGDLRGKPFAIEAENSILDISGFSKQYNCAFIWQKDGVKKLNLYLIINYFKGGKLRFKKIKPEAFEANRFYTVINKKSGEIVPMEVNFNFDDPNLIILPLAFGKRQGREFIWNDLLSLETGSLKLANGRVIEKTLYNRRTRQDEPALFVALTFERREVLDSSNIKPMNLIGVDRGENIPAVIALTDPEGCPLSRFKDSLGNPTHILRIGESYKEKQRTIQAKKEVEQRRAGGYSRKYASKAKNLADDMVRNTARDLLYYAVTQDAMLIFENLSRGFGRQGKRTFMAERQYTRMEDWLTAKLAYEGLPSKTYLSKTLAQYTISKTCSNCGFTITSADYDRVLEKLKKTATGWMTTINGKELKVEGQITYYNRYKRQNVVKDLSVELDRLSEESVNNDISSWTKGRSGEALSLLKKRFSHRPVQEKFVCLNCGFETHADEQAALNIARSWLFLRSQEYKKYQTNKTTGNTDKRAFVETWQSFYRKKLKEVWKPAV

SEQ ID NO: 240 - protein, 978 aa, synthetic construct
QEIKRINKIRRRLVKDSNTKKAGKTGPMKTLLVRVMTPDLRERLENLRKKPENIPQPISNTSRANLNKLLTDYTEMKKAILHVYWEEFQKDPVGLMSRVAQPASKKIDQNKLKPEMDEKGNLTTAGFACSQCGQPLFVYKLEQVSEKGKAYTNYFGRCNVAEHEKLILLAQLKPEKDSDEAVTYSLGKFGQRALDFYSIHVTKESTHPVKPLAQIAGNRYASGPVGKALSDACMGTIASFLSKYQDIIIEHQKVVKGNQKRLESLRELAGKENLEYPSVTLPPQPHTKEGVDAYNEVIARVRMWVNLNLWQKLKLSRDDAKPLLRLKGFPSFPLVERQANEVDWWDMVCNVKKLINEKKEDGKVFWQNLAGYKRQEALRPYLSSEEDRKKGKKFARYQLGDLLLHLEKKHGEDWGKVYDEAWERIDKKVEGLSKHIKLEEERRSEDAQSKAALTDWLRAKASFVIEGLKEADKDEFCRCELKLQKWYGDLRGKPFAIEAENSILDISGFSKQYNCAFIWQKDGVKKLNLYLIINYFKGGKLRFKKIKPEAFEANRFYTVINKKSGEIVPMEVNFNFDDPNLIILPLAFGKRQGREFIWNDLLSLETGSLKLANGRVIEKTLYNRRTRQDEPALFVALTFERREVLDSSNIKPMNLIGVDRGENIPAVIALTDPEGCPLSRFKDSLGNPTHILRIGESYKEKQRTIQAKKEVEQRRAGGYSRKYASKAKNLADDMVRNTARDLLYYAVTQDAMLIFENLSRGFGRQGKRTFMAERQYTRMEDWLTAKLAYEGLPSKTYLSKTLAQYTSKTKSNCGFTITSADYDRVLEKLKKTATGWMTTINGKELKVEGQITYYNRYKRQNVVKDLSVELDRLSEESVNNDISSWTKGRSGEALSLLKKRFSHRPVQEKFVCLNCGFETHADEQAALNIARSWLFLRSQEYKKYQTNKTTGNTDKRAFVETWQSFYRKKLKEVWKPAV

SEQ ID NO: 241 - protein, 978 aa, synthetic construct
QEIKRINKIRRRLVKDSNTKKAGKTGPMKTLLVRVMTPDLRERLENLRKKPENIPQPISNTSRANLNKLLTDYTEMKKAILHVYWEEFQKDPVGLMSRVAQPASKKIDQNKLKPEMDEKGNLTTAGFACSQCGQPLFVYKLEQVSEKGKAYTNYFGRCNVAEHEKLILLAQLKPEKDSDEAVTYSLGKFGQRALDFYSIHVTKESTHPVKPLAQIAGNRYASGPVGKALSDACMGTIASFLSKYQDIIIEHQKVVKGNQKRLESLRELAGKENLEYPSVTLPPQPHTKEGVDAYNEVIARVRMWVNLNLWQKLKLSRDDAKPLLRLKGFPSFPLVERQANEVDWWDMVCNVKKLINEKKEDGKVFWQNLAGYKRQEALRPYLSSEEDRKKGKKFARYQLGDLLLHLEKKHGEDWGKVYDEAWERIDKKVEGLSKHIKLEEERRSEDAQSKAALTDWLRAKASFVIEGLKEADKDEFCRCELKLQKWYGDLRGKPFAIEAENSILDISGFSKQYNCAFIWQKDGVKKLNLYLIINYFKGGKLRFKKIKPEAFEANRFYTVINKKSGEIVPMEVNFNFDDPNLIILPLAFGKRQGREFIWNDLLSLETGSLKLANGRVIEKTLYNRRTRQDEPALFVALTFERREVLDSSNIKPMNLIGVDRGENIPAVIALTDPEGCPLSRFKDSLGNPTHILRIGESYKEKQRTIQAKKEVEQRRAGGYSRKYASKAKNLADDMVRNTARDLLYYAVTQDAMLIFENLSRGFGRQGKRTFMAERQYTRMEDWLTAKLAYEGLPSKTYLSKQLAQYTSKTCSNCGFTITSADYDRVLEKLKKTATGWMTTINGKELKVEGQITYYNRYKRQNVVKDLSVELDRLSEESVNNDISSWTKGRSGEALSLLKKRFSHRPVQEKFVCLNCGFETHADEQAALNIARSWLFLRSQEYKKYQTNKTTGNTDKRAFVETWQSFYRKKLKEVWKPAV

SEQ ID NO: 242 - protein, 978 aa, synthetic construct
QEIKRINKIRRRLVKDSNTKKAGKTGPMKTLLVRVMTPDLRERLENLRKKPENIPQPISNTSRANLNKLLTDYTEMKKAILHVYWEEFQKDPVGLMSRVAQPASKKIDQNKLKPEMDEKGNLTTAGFACSQCGQPLFVYKLEQVSEKGKAYTNYFGRCNVAEHEKLILLAQLKPEKDSDEAVTYSLGKFGQRALDFYSIHVTKESTHPVKPLAQIAGNRYASGPVGKALSDACMGTIASFLSKYQDIIIEHQKVVKGNQKRLESLRELAGKENLEYPSVTLPPQPHTKEGVDAYNEVIARVRMWVNLNLWQKLKLSRDDAKPLLRLKGFPSFPLVERQANEVDWWDMVCNVKKLINEKKEDGKVFWQNLAGYKRQEALRPYLSSEEDRKKGKKFARYQLGDLLLHLEKKHGEDWGKVYDEAWERIDKKVEGLSKHIKLEEERRSEDAQSKAALTDWLRAKASFVIEGLKEADKDEFCRCELKLQKWYGDLRGKPFAIEAENSILDISGFSKQYNCAFIWQKDGVKKLNLYLIINYFKGGKLRFKKIKPEAFEANRFYTVINKKSGEIVPMEVNFNFDDPNLIILPLAFGKRQGREFIWNDLLSLETGSLKLANGRVIEKTLYNRRTRQDEPALFVALTFERREVLDSSNIKPMNLIGVDRGENIPAVIALTDPEGCPLSRFKDSLGNPTHILRIGESYKEKQRTIQAKKEVEQRRAGGYSRKYASKAKNLADDMVRNTARDLLYYAVTQDAMLIFENLSRGFGRQGKRTFMAERQYTRMEDWLTAKLAYEGLPSKTYLSKTLAQYYSKTCSNCGFTITSADYDRVLEKLKKTATGWMTTINGKELKVEGQITYYNRYKRQNVVKDLSVELDRLSEESVNNDISSWTKGRSGEALSLLKKRFSHRPVQEKFVCLNCGFETHADEQAALNIARSWLFLRSQEYKKYQTNKTTGNTDKRAFVETWQSFYRKKLKEVWKPAV

SEQ ID NO: 243 - protein, 978 aa, synthetic construct
QEIKRINKIRRRLVKDSNTKKAGKTGPMKTLLVRVMTPDLRERLENLRKKPENIPQPISNTSRANLNKLLTDYTEMKKAILHVYWEEFQKDPVGLMSRVAQPASKKIDQNKLKPEMDEKGNLTTAGFACSQCGQPLFVYKLEQVSEKGKAYTNYFGRCNVAEHEKLILLAQLKPEKDSDEAVTYSLGKFGQRALDFYSIHVTKESTHPVKPLAQIAGNRYASGPVGKALSDACMGTIASFLSKYQDIIIEHQKVVKGNQKRLESLRELAGKENLEYPSVTLPPQPHTKEGVDAYNEVIARVRMWVNLNLWQKLKLSRDDAKPLLRLKGFPSFPLVERQANEVDWWDMVCNVKKLINEKKEDGKVFWQNLAGYKRQEALRPYLSSEEDRKKGKKFARYQLGDLLLHLEKKHGEDWGKVYDEAWERIDKKVEGLSKHIKLEEERRSEDAQSKAALTDWLRAKASFVIEGLKEADKDEFCRCELKLQKWYGDLRGKPFAIEAENSILDISGFSKQYNCAFIWQKDGVKKLNLYLIINYFKGGKLRFKKIKPEAFEANRFYTVINKKSGEIVPMEVNFNFDDPNLIILPLAFGKRQGREFIWNDLLSLETGSLKLANGRVIEKTLYNRRTRQDEPALFVALTFERREVLDSSNIKPMNLIGVDRGENIPAVIALTDPEGCPLSRFKDSLGNPTHILRIGESYKEKQRTIQAKKEVEQRRAGGYSRKYASKAKNLADDMVRNTARDLLYYAVTQDAMLIFENLSRGFGRQGKRTFMAERQYTRMEDWLTAKLAYEGLPSKTYLSKTLAKYTSKTCSNCGFTITSADYDRVLEKLKKTATGWMTTINGKELKVEGQITYYNRYKRQNVVKDLSVELDRLSEESVNNDISSWTKGRSGEALSLLKKRFSHRPVQEKFVCLNCGFETHADEQAALNIARSWLFLRSQEYKKYQTNKTTGNTDKRAFVETWQSFYRKKLKEVWKPAV

SEQ ID NO: 244 - protein, 978 aa, synthetic construct
QEIKRINKIRRRLVKDSNTKKAGKTGPMKTLLVRVMTPDLRERLENLRKKPENIPQPISNTSRANLNKLLTDYTEMKKAILHVYWEEFQKDPVGLMSRVAQPASKKIDQNKLKPEMDEKGNLTTAGFACSQCGQPLFVYKLEQVSEKGKAYTNYFGRCNVAEHEKLILLAQLKPEKDSDEAVTYSLGKFGQRALDFYSIHVTKESTHPVKPLAQIAGNRYASGPVGKALSDACMGTIASFLSKYQDIIIEHQKVVKGNQKRLESLRELAGKENLEYPSVTLPPQPHTKEGVDAYNEVIARVRMWVNLNLWQKLKLSRDDAKPLLRLKGFPSFPLVERQANEVDWWDMVCNVKKLINEKKEDGKVFWQNLAGYKRQEALRPYLSSEEDRKKGKKFARYQLGDLLLHLEKKHGEDWGKVYDEAWERIDKKVEGLSKHIKLEEERRSEDAQSKAALTDWLRAKASFVIEGLKEADKDEFCRCELKLQKWYGDLRGKPFAIEAENSILDISGFSKQYNCAFIWQKDGVKKLNLYLIINYFKGGKLRFKKIKPEAFEANRFYTVINKKSGEIVPMEVNFNFDDPNLIILPLAFGKRQGREFIWNDLLSLETGSLKLANGRVIEKTLYNRRTRQDEPALFVALTFERREVLDSSNIKPMNLIGVDRGENIPAVIALTDPEGCPLSRFKDSLGNPTHILRIGESYKEKQRTIQAKKEVEQRRAGGYSRKYASKAKNLADDMVRNTARDLLYYAVTQDAMLIFENLSRGFGRQGKRTFMAERQYTRMEDWLTAKLAYEGLASKTYLSKTLAQYTSKTCSNCGFTITSADYDRVLEKLKKTATGWMTTINGKELKVEGQITYYNRYKRQNVVKDLSVELDRLSEESVNNDISSWTKGRSGEALSLLKKRFSHRPVQEKFVCLNCGFETHADEQAALNIARSWLFLRSQEYKKYQTNKTTGNTDKRAFVETWQSFYRKKLKEVWKPAV

SEQ ID NO: 245 - protein, 979 aa, synthetic construct
QEIKRINKIRRRLVKDSNTKKAGKTGPMKTLLVRVMTPDLRERLENLRKKPENIPQPISNTSRANLNKLLTDYTEMKKAILHVYWEEFQKDPVGLMSRVAQPASKKIDQNKLKPEMDEKGNLTTAGFACSQCGQPLFVYKLEQVSEKGKAYTNYFGRCNVAEHEKLILLAQLKPEKDSDEAVTYSLGKFGQRALDFYSIHVTKESTHPVKPLAQIAGNRYASGPVGKALSDACMGTIASFLSKYQDIIIEHQKVVKGNQKRLESLRELAGKENLEYPSVTLPPQPHTKEGVDAYNEVIARVRMWVNLNLWQKLKLSRDDAKPLLRLKGFPSFPLVERQANEVDWWDMVCNVKKLINEKKEDGKVFWQNLAGYKRQEALRPYLSSEEDRKKGKKFARYQLGDLLLHLEKKHGEDWGKVYDEAWERIDKKVEGLSKHIKLEEERRSEDAQSKAALTDWLRAKASFVIEGLKEADKDEFCRCELKLQKWYGDLRGKPFAIEAENSILDISGFSKQYNCAFIWQKDGVKKLNLYLIINYFKGGKLRFKKIKPEAFEANRFYTVINKKSGEIVPMEVNFNFDDPNLIILPLAFGKRQGREFIWNDLLSLETGSLKLANGRVIEKTLYNRRTRQDEPALFVALTFERREVLDSSNIKPMNLIGVDRGENIPAVIALTDPEGCPLSRFKDSLGNPTHILRIGESYKEKQRTIQAKKEVEQRRAGGYSRKYASKAKNLADDMVRNTARDLLYYAVTQDAMLIFENLSRGFGRQGKRTFMAERQYTRMEDWLTAKLAYEGLPSKTYLSKTLLAQYTSKTCSNCGFTITSADYDRVLEKLKKTATGWMTTINGKELKVEGQITYYNRYKRQNVVKDLSVELDRLSEESVNNDISSWTKGRSGEALSLLKKRFSHRPVQEKFVCLNCGFETHADEQAALNIARSWLFLRSQEYKKYQTNKTTGNTDKRAFVETWQSFYRKKLKEVWKPAV

SEQ ID NO: 246 - protein, 977 aa, synthetic construct
QEIKRINKIRRRLVKDSNTKKAGKTGPMKTLLVRVMTPDLRERLENLRKKPENIPQPISNTSRANLNKLLTDYTEMKKAILHVYWEEFQKDPVGLMSRVAQPASKKIDQNKLKPEMDEKGNLTTAGFACSQCGQPLFVYKLEQVSEKGKAYTNYFGRCNVAEHEKLILLAQLKPEKDSDEAVTYSLGKFGQRALDFYSIHVTKESTHPVKPLAQIAGNRYASGPVGKALSDACMGTIASFLSKYQDIIIEHQKVVKGNQKRLESLRELAGKENLEYPSVTLPPQPHTKEGVDAYNEVIARVRMWVNLNLWQKLKLSRDDAKPLLRLKGFPSFPLVERQANEVDWWDMVCNVKKLINEKKEDGKVFWQNLAGYKRQEALRPYLSSEEDRKKGKKFARYQLGDLLLHLEKKHGEDWGKVYDEAWERIDKKVEGLSKHIKLEEERRSEDAQSKAALTDWLRAKASFVIEGLKEADKDEFCRCELKLQKWYGDLRGKPFAIEAENSILDISGFSKQYNCAFIWQKDGVKKLNLYLIINYFKGGKLRFKKIKPEAFEANRFYTVINKKSGEIVPMEVNFNFDDPNLIILPLAFGKRQGREFIWNDLLSLETGSLKLANGRVIEKTLYNRRTRQDEPALFVALTFERREVLDSSNIKPMNLIGVDRGENIPAVIALTDPEGCPLSRFKDSLGNPTHILRIGESYKEKQRTIQAKKEVEQRRAGGYSRKYASKAKNLADDMVRNTARDLLYYAVTQDAMLIFENLSRGFGRQGKRTFMAERQYTRMEDWLTAKLAYEGLPSKTYLSKTAQYTSKTCSNCGFTITSADYDRVLEKLKKTATGWMTTINGKELKVEGQITYYNRYKRQNVVKDLSVELDRLSEESVNNDISSWTKGRSGEALSLLKKRFSHRPVQEKFVCLNCGFETHADEQAALNIARSWLFLRSQEYKKYQTNKTTGNTDKRAFVETWQSFYRKKLKEVWKPAV

SEQ ID NO: 247 - protein, 979 aa, synthetic construct
QEIKRINKIRRRLVKDSNTKKAGKTGPMKTLLVRVMTPDLRERLENLRKKPENIPQPISNTSRANLNKLLTDYTEMKKAILHVYWEEFQKDPVGLMSRVAQPASKKIDQNKLKPEMDEKGNLTTAGFACSQCGQPLFVYKLEQVSEKGKAYTNYFGRCNVAEHEKLILLAQLKPEKDSDEAVTYSLGKFGQRALDFYSIHVTKESTHPVKPLAQIAGNRYASGPVGKALSDACMGTIASFLSKYQDIIIEHQKVVKGNQKRLESLRELAGKENLEYPSVTLPPQPHTKEGVDAYNEVIARVRMWVNLNLWQKLKLSRDDAKPLLRLKGFPSFPLVERQANEVDWWDMVCNVKKLINEKKEDGKVFWQNLAGYKRQEALRPYLSSEEDRKKGKKFARYQLGDLLLHLEKKHGEDWGKVYDEAWERIDKKVEGLSKHIKLEEERRSEDAQSKAALTDWLRAKASFVIEGLKEADKDEFCRCELKLQKWYGDLRGKPFAIEAENSILDISGFSKQYNCAFIWQKDGVKKLNLYLIINYFKGGKLRFKKIKPEAFEANRFYTVINKKSGEIVPMEVNFNFDDPNLIILPLAFGKRQGREFIWNDLLSLETGSLKLANGRVIEKTLYNRRTRQDEPALFVALTFERREVLDSSNIKPMNLIGVDRGENIPAVIALTDPEGCPLSRFKDSLGNPTHILRIGESYKEKQRTIQAKKEVEQRRAGGYSRKYASKAKNLADDMVRNTARDLLYYAVTQDAMLIFENLSRGFGRQGKRTFMAERQYTRMEDWLTAKLAYEGLPSKTYLSKTLAQYTSKTCSNCGFTWITSADYDRVLEKLKKTATGWMTTINGKELKVEGQITYYNRYKRQNVVKDLSVELDRLSEESVNNDISSWTKGRSGEALSLLKKRFSHRPVQEKFVCLNCGFETHADEQAALNIARSWLFLRSQEYKKYQTNKTTGNTDKRAFVETWQSFYRKKLKEVWKPAV

SEQ ID NO: 248 - protein, 979 aa, synthetic construct
QEIKRINKIRRRLVKDSNTKKAGKTGPMKTLLVRVMTPDLRERLENLRKKPENIPQPISNTSRANLNKLLTDYTEMKKAILHVYWEEFQKDPVGLMSRVAQPASKKIDQNKLKPEMDEKGNLTTAGFACSQCGQPLFVYKLEQVSEKGKAYTNYFGRCNVAEHEKLILLAQLKPEKDSDEAVTYSLGKFGQRALDFYSIHVTKESTHPVKPLAQIAGNRYASGPVGKALSDACMGTIASFLSKYQDIIIEHQKVVKGNQKRLESLRELAGKENLEYPSVTLPPQPHTKEGVDAYNEVIARVRMWVNLNLWQKLKLSRDDAKPLLRLKGFPSFPLVERQANEVDWWDMVCNVKKLINEKKEDGKVFWQNLAGYKRQEALRPYLSSEEDRKKGKKFARYQLGDLLLHLEKKHGEDWGKVYDEAWERIDKKVEGLSKHIKLEEERRSEDAQSKAALTDWLRAKASFVIEGLKEADKDEFCRCELKLQKWYGDLRGKPFAIEAENSILDISGFSKQYNCAFIWQKDGVKKLNLYLIINYFKGGKLRFKKIKPEAFEANRFYTVINKKSGEIVPMEVNFNFDDPNLIILPLAFGKRQGREFIWNDLLSLETGSLKLANGRVIEKTLYNRRTRQDEPALFVALTFERREVLDSSNIKPMNLIGVDRGENIPAVIALTDPEGCPLSRFKDSLGNPTHILRIGESYKEKQRTIQAKKEVEQRRAGGYSRKYASKAKNLADDMVRNTARDLLYYAVTQDAMLIFENLSRGFGRQGKRTFMAERQYTRMEDWLTAKLAYEGLPSKTYLSKHTLAQYTSKTCSNCGFTITSADYDRVLEKLKKTATGWMTTINGKELKVEGQITYYNRYKRQNVVKDLSVELDRLSEESVNNDISSWTKGRSGEALSLLKKRFSHRPVQEKFVCLNCGFETHADEQAALNIARSWLFLRSQEYKKYQTNKTTGNTDKRAFVETWQSFYRKKLKEVWKPAV

SEQ ID NO: 249 - protein, 978 aa, synthetic construct
QEIKRINKIRRRLVKDSNTKKAGKTGPMKTLLVRVMTPDLRERLENLRKKPENIPQPISNTSRANLNKLLTDYTEMKKAILHVYWEEFQKDPVGLMSRVAQPASKKIDQNKLKPEMDEKGNLTTAGFACSQCGQPLFVYKLEQVSEKGKAYTNYFGRCNVAEHEKLILLAQLKPEKDSDEAVTYSLGKFGQRALDFYSIHVTKESTHPVKPLAQIAGNRYASGPVGKALSDACMGTIASFLSKYQDIIIEHQKVVKGNQKRLESLRELAGKENLEYPSVTLPPQPHTKEGVDAYNEVIARVRMWVNLNLWQKLKLSRDDAKPLLRLKGFPSFPLVERQANEVDWWDMVCNVKKLINEKKEDGKVFWQNLAGYKRQEALRPYLSSEEDRKKGKKFARYQLGDLLLHLEKKHGEDWGKVYDEAWERIDKKVEGLSKHIKLEEERRSEDAQSKAALTDWLRAKASFVIEGLKEADKDEFCRCELKLQKWYGDLRGKPFAIEAENSILDISGFSKQYNCAFIWQKDGVKKLNLYLIINYFKGGKLRFKKIKPEAFEANRFYTVINKKSGEIVPMEVNFNFDDPNLIILPLAFGKRQGREFIWNDLLSLETGSLKLANGRVIEKTLYNRRTRQDEPALFVALTFERREVLDSSNIKPMNLIGVDRGENIPAVIALTDPEGCPLSRFKDSLGNPTHILRIGESYKEKQRTIQAKKEVEQRRAGGYSRKYASKAKNLADDMVRNTARDLLYYAVTQDAMLIFENLSRGFGRQGKRTFMAERQYTRMEDWLTAKLAYEGLPSKTYLSKTLAQYTSKPCSNCGFTITSADYDRVLEKLKKTATGWMTTINGKELKVEGQITYYNRYKRQNVVKDLSVELDRLSEESVNNDISSWTKGRSGEALSLLKKRFSHRPVQEKFVCLNCGFETHADEQAALNIARSWLFLRSQEYKKYQTNKTTGNTDKRAFVETWQSFYRKKLKEVWKPAV

SEQ ID NO: 250 - protein, 979 aa, synthetic construct
QEIKRINKIRRRLVKDSNTKKAGKTGPMKTLLVRVMTPDLRERLENLRKKPENIPQPISNTSRANLNKLLTDYTEMKKAILHVYWEEFQKDPVGLMSRVAQPASKKIDQNKLKPEMDEKGNLTTAGFACSQCGQPLFVYKLEQVSEKGKAYTNYFGRCNVAEHEKLILLAQLKPEKDSDEAVTYSLGKFGQRALDFYSIHVTKESTHPVKPLAQIAGNRYASGPVGKALSDACMGTIASFLSKYQDIIIEHQKVVKGNQKRLESLRELAGKENLEYPSVTLPPQPHTKEGVDAYNEVIARVRMWVNLNLWQKLKLSRDDAKPLLRLKGFPSFPLVERQANEVDWWDMVCNVKKLINEKKEDGKVFWQNLAGYKRQEALRPYLSSEEDRKKGKKFARYQLGDLLLHLEKKHGEDWGKVYDEAWERIDKKVEGLSKHIKLEEERRSEDAQSKAALTDWLRAKASFVIEGLKEADKDEFCRCELKLQKWYGDLRGKPFAIEAENSILDISGFSKQYNCAFIWQKDGVKKLNLYLIINYFKGGKLRFKKIKPEAFEANRFYTVINKKSGEIVPMEVNFNFDDPNLIILPLAFGKRQGREFIWNDLLSLETGSLKLANGRVIEKTLYNRRTRQDEPALFVALTFERREVLDSSNIKPMNLIGVDRGENIPAVIALTDPEGCPLSRFKDSLGNPTHILRIGESYKEKQRTIQAKKEVEQRRAGGYSRKYASKAKNLADDMVRNTARDLLYYAVTQDAMLIFENLSRGFGRQGKRTFMAERQYTRMEDWLTAKLAYEGLPSKTYLSKTLAAQYTSKTCSNCGFTITSADYDRVLEKLKKTATGWMTTINGKELKVEGQITYYNRYKRQNVVKDLSVELDRLSEESVNNDISSWTKGRSGEALSLLKKRFSHRPVQEKFVCLNCGFETHADEQAALNIARSWLFLRSQEYKKYQTNKTTGNTDKRAFVETWQSFYRKKLKEVWKPAV

SEQ ID NO: 251 - protein, 979 aa, synthetic construct
QEIKRINKIRRRLVKDSNTKKAGKTGPMKTLLVRVMTPDLRERLENLRKKPENIPQPISNTSRANLNKLLTDYTEMKKAILHVYWEEFQKDPVGLMSRVAQPASKKIDQNKLKPEMDEKGNLTTAGFACSQCGQPLFVYKLEQVSEKGKAYTNYFGRCNVAEHEKLILLAQLKPEKDSDEAVTYSLGKFGQRALDFYSIHVTKESTHPVKPLAQIAGNRYASGPVGKALSDACMGTIASFLSKYQDIIIEHQKVVKGNQKRLESLRELAGKENLEYPSVTLPPQPHTKEGVDAYNEVIARVRMWVNLNLWQKLKLSRDDAKPLLRLKGFPSFPLVERQANEVDWWDMVCNVKKLINEKKEDGKVFWQNLAGYKRQEALRPYLSSEEDRKKGKKFARYQLGDLLLHLEKKHGEDWGKVYDEAWERIDKKVEGLSKHIKLEEERRSEDAQSKAALTDWLRAKASFVIEGLKEADKDEFCRCELKLQKWYGDLRGKPFAIEAENSILDISGFSKQYNCAFIWQKDGVKKLNLYLIINYFKGGKLRFKKIKPEAFEANRFYTVINKKSGEIVPMEVNFNFDDPNLIILPLAFGKRQGREFIWNDLLSLETGSLKLANGRVIEKTLYNRRTRQDEPALFVALTFERREVLDSSNIKPMNLIGVDRGENIPAVIALTDPEGCPLSRFKDSLGNPTHILRIGESYKEKQRTIQAKKEVEQRRAGGYSRKYASKAKNLADDMVRNTARDLLYYAVTQDAMLIFENLSRGFGRQGKRTFMAERQYTRMEDWLTAKLAYEGLPSKTYLSKTLAQYTSKTCSNCGGFTITSADYDRVLEKLKKTATGWMTTINGKELKVEGQITYYNRYKRQNVVKDLSVELDRLSEESVNNDISSWTKGRSGEALSLLKKRFSHRPVQEKFVCLNCGFETHADEQAALNIARSWLFLRSQEYKKYQTNKTTGNTDKRAFVETWQSFYRKKLKEVWKPAV

SEQ ID NO: 252 - protein, 979 aa, synthetic construct
QEIKRINKIRRRLVKDSNTKKAGKTGPMKTLLVRVMTPDLRERLENLRKKPENIPQPISNTSRANLNKLLTDYTEMKKAILHVYWEEFQKDPVGLMSRVAQPASKKIDQNKLKPEMDEKGNLTTAGFACSQCGQPLFVYKLEQVSEKGKAYTNYFGRCNVAEHEKLILLAQLKPEKDSDEAVTYSLGKFGQRALDFYSIHVTKESTHPVKPLAQIAGNRYASGPVGKALSDACMGTIASFLSKYQDIIIEHQKVVKGNQKRLESLRELAGKENLEYPSVTLPPQPHTKEGVDAYNEVIARVRMWVNLNLWQKLKLSRDDAKPLLRLKGFPSFPLVERQANEVDWWDMVCNVKKLINEKKEDGKVFWQNLAGYKRQEALRPYLSSEEDRKKGKKFARYQLGDLLLHLEKKHGEDWGKVYDEAWERIDKKVEGLSKHIKLEEERRSEDAQSKAALTDWLRAKASFVIEGLKEADKDEFCRCELKLQKWYGDLRGKPFAIEAENSILDISGFSKQYNCAFIWQKDGVKKLNLYLIINYFKGGKLRFKKIKPEAFEANRFYTVINKKSGEIVPMEVNFNFDDPNLIILPLAFGKRQGREFIWNDLLSLETGSLKLANGRVIEKTLYNRRTRQDEPALFVALTFERREVLDSSNIKPMNLIGVDRGENIPAVIALTDPEGCPLSRFKDSLGNPTHILRIGESYKEKQRTIQAKKEVEQRRAGGYSRKYASKAKNLADDMVRNTARDLLYYAVTQDAMLIFENLSRGFGRQGKRTFMAERQYTRMEDWLTAKLAYEGLPSKTYLSKTLFAQYTSKTCSNCGFTITSADYDRVLEKLKKTATGWMTTINGKELKVEGQITYYNRYKRQNVVKDLSVELDRLSEESVNNDISSWTKGRSGEALSLLKKRFSHRPVQEKFVCLNCGFETHADEQAALNIARSWLFLRSQEYKKYQTNKTTGNTDKRAFVETWQSFYRKKLKEVWKPAV

SEQ ID NO: 253 - protein, 979 aa, synthetic construct
QEIKRINKIRRRLVKDSNTKKAGKTGPMKTLLVRVMTPDLRERLENLRKKPENIPQPISNTSRANLNKLLTDYTEMKKAILHVYWEEFQKDPVGLMSRVAQPASKKIDQNKLKPEMDEKGNLTTAGFACSQCGQPLFVYKLEQVSEKGKAYTNYFGRCNVAEHEKLILLAQLKPEKDSDEAVTYSLGKFGQRALDFYSIHVTKESTHPVKPLAQIAGNRYASGPVGKALSDACMGTIASFLSKYQDIIIEHQKVVKGNQKRLESLRELAGKENLEYPSVTLPPQPHTKEGVDAYNEVIARVRMWVNLNLWQKLKLSRDDAKPLLRLKGFPSFPLVERQANEVDWWDMVCNVKKLINEKKEDGKVFWQNLAGYKRQEALRPYLSSEEDRKKGKKFARYQLGDLLLHLEKKHGEDWGKVYDEAWERIDKKVEGLSKHIKLEEERRSEDAQSKAALTDWLRAKASFVIEGLKEADKDEFCRCELKLQKWYGDLRGKPFAIEAENSILDISGFSKQYNCAFIWQKDGVKKLNLYLIINYFKGGKLRFKKIKPEAFEANRFYTVINKKSGEIVPMEVNFNFDDPNLIILPLAFGKRQGREFIWNDLLSLETGSLKLANGRVIEKTLYNRRTRQDEPALFVALTFERREVLDSSNIKPMNLIGVDRGENIPAVIALTDPEGCPLSRFKDSLGNPTHILRIGESYKEKQRTIQAKKEVEQRRAGGYSRKYASKAKNLADDMVRNTARDLLYYAVTQDAMLIFENLSRGFGRQGKRTFMAERQYTRMEDWLTAKLAYEGLPSKTYLSKTLAQYTSKNTCSNCGFTITSADYDRVLEKLKKTATGWMTTINGKELKVEGQITYYNRYKRQNVVKDLSVELDRLSEESVNNDISSWTKGRSGEALSLLKKRFSHRPVQEKFVCLNCGFETHADEQAALNIARSWLFLRSQEYKKYQTNKTTGNTDKRAFVETWQSFYRKKLKEVWKPAV

SEQ ID NO: 254 - protein, 978 aa, synthetic construct
QEIKRINKIRRRLVKDSNTKKAGKTGPMKTLLVRVMTPDLRERLENLRKKPENIPQPISNTSRANLNKLLTDYTEMKKAILHVYWEEFQKDPVGLMSRVAQPASKKIDQNKLKPEMDEKGNLTTAGFACSQCGQPLFVYKLEQVSEKGKAYTNYFGRCNVAEHEKLILLAQLKPEKDSDEAVTYSLGKFGQRALDFYSIHVTKESTHPVKPLAQIAGNRYASGPVGKALSDACMGTIASFLSKYQDIIIEHQKVVKGNQKRLESLRELAGKENLEYPSVTLPPQPHTKEGVDAYNEVIARVRMWVNLNLWQKLKLSRDDAKPLLRLKGFPSFPLVERQANEVDWWDMVCNVKKLINEKKEDGKVFWQNLAGYKRQEALRPYLSSEEDRKKGKKFARYQLGDLLLHLEKKHGEDWGKVYDEAWERIDKKVEGLSKHIKLEEERRSEDAQSKAALTDWLRAKASFVIEGLKEADKDEFCRCELKLQKWYGDLRGKPFAIEAENSILDISGFSKQYNCAFIWQKDGVKKLNLYLIINYFKGGKLRFKKIKPEAFEANRFYTVINKKSGEIVPMEVNFNFDDPNLIILPLAFGKRQGREFIWNDLLSLETGSLKLANGRVIEKTLYNRRTRQDEPALFVALTFERREVLDSSNIKPMNLIGVDRGENIPAVIALTDPEGCPLSRFKDSLGNPTHILRIGESYKEKQRTIQAKKEVEQRRAGGYSRKYASKAKNLADDMVRNTARDLLYYAVTQDAMLIFENLSRGFGRQGKRTFMAERQYTRMEDWLTAKLAYEGLPSKTYLSKTLAQYTSKTCSNCGPTITSADYDRVLEKLKKTATGWMTTINGKELKVEGQITYYNRYKRQNVVKDLSVELDRLSEESVNNDISSWTKGRSGEALSLLKKRFSHRPVQEKFVCLNCGFETHADEQAALNIARSWLFLRSQEYKKYQTNKTTGNTDKRAFVETWQSFYRKKLKEVWKPAV

SEQ ID NO: 255 - protein, 979 aa, synthetic construct
QEIKRINKIRRRLVKDSNTKKAGKTGPMKTLLVRVMTPDLRERLENLRKKPENIPQPISNTSRANLNKLLTDYTEMKKAILHVYWEEFQKDPVGLMSRVAQPASKKIDQNKLKPEMDEKGNLTTAGFACSQCGQPLFVYKLEQVSEKGKAYTNYFGRCNVAEHEKLILLAQLKPEKDSDEAVTYSLGKFGQRALDFYSIHVTKESTHPVKPLAQIAGNRYASGPVGKALSDACMGTIASFLSKYQDIIIEHQKVVKGNQKRLESLRELAGKENLEYPSVTLPPQPHTKEGVDAYNEVIARVRMWVNLNLWQKLKLSRDDAKPLLRLKGFPSFPLVERQANEVDWWDMVCNVKKLINEKKEDGKVFWQNLAGYKRQEALRPYLSSEEDRKKGKKFARYQLGDLLLHLEKKHGEDWGKVYDEAWERIDKKVEGLSKHIKLEEERRSEDAQSKAALTDWLRAKASFVIEGLKEADKDEFCRCELKLQKWYGDLRGKPFAIEAENSILDISGFSKQYNCAFIWQKDGVKKLNLYLIINYFKGGKLRFKKIKPEAFEANRFYTVINKKSGEIVPMEVNFNFDDPNLIILPLAFGKRQGREFIWNDLLSLETGSLKLANGRVIEKTLYNRRTRQDEPALFVALTFERREVLDSSNIKPMNLIGVDRGENIPAVIALTDPEGCPLSRFKDSLGNPTHILRIGESYKEKQRTIQAKKEVEQRRAGGYSRKYASKAKNLADDMVRNTARDLLYYAVTQDAMLIFENLSRGFGRQGKRTFMAERQYTRMEDWLTAKLAYEGLPSKTYLSKTWLAQYTSKTCSNCGFTITSADYDRVLEKLKKTATGWMTTINGKELKVEGQITYYNRYKRQNVVKDLSVELDRLSEESVNNDISSWTKGRSGEALSLLKKRFSHRPVQEKFVCLNCGFETHADEQAALNIARSWLFLRSQEYKKYQTNKTTGNTDKRAFVETWQSFYRKKLKEVWKPAV

SEQ ID NO: 256 - protein, 978 aa, synthetic construct
QEIKRINKIRRRLVKDSNTKKAGKTGPMKTLLVRVMTPDLRERLENLRKKPENIPQPISNTSRANLNKLLTDYTEMKKAILHVYWEEFQKDPVGLMSRVAQPASKKIDQNKLKPEMDEKGNLTTAGFACSQCGQPLFVYKLEQVSEKGKAYTNYFGRCNVAEHEKLILLAQLKPEKDSDEAVTYSLGKFGQRALDFYSIHVTKESTHPVKPLAQIAGNRYASGPVGKALSDACMGTIASFLSKYQDIIIEHQKVVKGNQKRLESLRELAGKENLEYPSVTLPPQPHTKEGVDAYNEVIARVRMWVNLNLWQKLKLSRDDAKPLLRLKGFPSFPLVERQANEVDWWDMVCNVKKLINEKKEDGKVFWQNLAGYKRQEALRPYLSSEEDRKKGKKFARYQLGDLLLHLEKKHGEDWGKVYDEAWERIDKKVEGLSKHIKLEEERRSEDAQSKAALTDWLRAKASFVIEGLKEADKDEFCRCELKLQKWYGDLRGKPFAIEAENSILDISGFSKQYNCAFIWQKDGVKKLNLYLIINYFKGGKLRFKKIKPEAFEANRFYTVINKKSGEIVPMEVNFNFDDPNLIILPLAFGKRQGREFIWNDLLSLETGSLKLANGRVIEKTLYNRRTRQDEPALFVALTFERREVLDSSNIKPMNLIGVDRGENIPAVIALTDPEGCPLSRFKDSLGNPTHILRIGESYKEKQRTIQAKKEVEQRRAGGYSRKYASKAKNLADDMVRNTARDLLYYAVTQDAMLIFENLSRGFGRQGKRTFMAERQYTRMEDWLTAKLAYEGLPSKTYLSKTLAQYTSKTMSNCGFTITSADYDRVLEKLKKTATGWMTTINGKELKVEGQITYYNRYKRQNVVKDLSVELDRLSEESVNNDISSWTKGRSGEALSLLKKRFSHRPVQEKFVCLNCGFETHADEQAALNIARSWLFLRSQEYKKYQTNKTTGNTDKRAFVETWQSFYRKKLKEVWKPAV

SEQ ID NO: 257 - protein, 977 aa, synthetic construct
QEIKRINKIRRRLVKDSNTKKAGKTGPMKTLLVRVMTPDLRERLENLRKKPENIPQPISNTSRANLNKLLTDYTEMKKAILHVYWEEFQKDPVGLMSRVAQPASKKIDQNKLKPEMDEKGNLTTAGFACSQCGQPLFVYKLEQVSEKGKAYTNYFGRCNVAEHEKLILLAQLKPEKDSDEAVTYSLGKFGQRALDFYSIHVTKESTHPVKPLAQIAGNRYASGPVGKALSDACMGTIASFLSKYQDIIIEHQKVVKGNQKRLESLRELAGKENLEYPSVTLPPQPHTKEGVDAYNEVIARVRMWVNLNLWQKLKLSRDDAKPLLRLKGFPSFPLVERQANEVDWWDMVCNVKKLINEKKEDGKVFWQNLAGYKRQEALRPYLSSEEDRKKGKKFARYQLGDLLLHLEKKHGEDWGKVYDEAWERIDKKVEGLSKHIKLEEERRSEDAQSKAALTDWLRAKASFVIEGLKEADKDEFCRCELKLQKWYGDLRGKPFAIEAENSILDISGFSKQYNCAFIWQKDGVKKLNLYLIINYFKGGKLRFKKIKPEAFEANRFYTVINKKSGEIVPMEVNFNFDDPNLIILPLAFGKRQGREFIWNDLLSLETGSLKLANGRVIEKTLYNRRTRQDEPALFVALTFERREVLDSSNIKPMNLIGVDRGENIPAVIALTDPEGCPLSRFKDSLGNPTHILRIGESYKEKQRTIQAKKEVEQRRAGGYSRKYASKAKNLADDMVRNTARDLLYYAVTQDAMLIFENLSRGFGRQGKRTFMAERQYTRMEDWLTAKLAYEGLPSKTYLSKTLAQYTSKTCSCGFTITSADYDRVLEKLKKTATGWMTTINGKELKVEGQITYYNRYKRQNVVKDLSVELDRLSEESVNNDISSWTKGRSGEALSLLKKRFSHRPVQEKFVCLNCGFETHADEQAALNIARSWLFLRSQEYKKYQTNKTTGNTDKRAFVETWQSFYRKKLKEVWKPAV

SEQ ID NO: 258 - protein, 979 aa, synthetic construct
QEIKRINKIRRRLVKDSNTKKAGKTGPMKTLLVRVMTPDLRERLENLRKKPENIPQPISNTSRANLNKLLTDYTEMKKAILHVYWEEFQKDPVGLMSRVAQPASKKIDQNKLKPEMDEKGNLTTAGFACSQCGQPLFVYKLEQVSEKGKAYTNYFGRCNVAEHEKLILLAQLKPEKDSDEAVTYSLGKFGQRALDFYSIHVTKESTHPVKPLAQIAGNRYASGPVGKALSDACMGTIASFLSKYQDIIIEHQKVVKGNQKRLESLRELAGKENLEYPSVTLPPQPHTKEGVDAYNEVIARVRMWVNLNLWQKLKLSRDDAKPLLRLKGFPSFPLVERQANEVDWWDMVCNVKKLINEKKEDGKVFWQNLAGYKRQEALRPYLSSEEDRKKGKKFARYQLGDLLLHLEKKHGEDWGKVYDEAWERIDKKVEGLSKHIKLEEERRSEDAQSKAALTDWLRAKASFVIEGLKEADKDEFCRCELKLQKWYGDLRGKPFAIEAENSILDISGFSKQYNCAFIWQKDGVKKLNLYLIINYFKGGKLRFKKIKPEAFEANRFYTVINKKSGEIVPMEVNFNFDDPNLIILPLAFGKRQGREFIWNDLLSLETGSLKLANGRVIEKTLYNRRTRQDEPALFVALTFERREVLDSSNIKPMNLIGVDRGENIPAVIALTDPEGCPLSRFKDSLGNPTHILRIGESYKEKQRTIQAKKEVEQRRAGGYSRKYASKAKNLADDMVRNTARDLLYYAVTQDAMLIFENLSRGFGRQGKRTFMAERQYTRMEDWLTAKLAYEGLPSKTYLSKTLAQYTSKTCSVNCGFTITSADYDRVLEKLKKTATGWMTTINGKELKVEGQITYYNRYKRQNVVKDLSVELDRLSEESVNNDISSWTKGRSGEALSLLKKRFSHRPVQEKFVCLNCGFETHADEQAALNIARSWLFLRSQEYKKYQTNKTTGNTDKRAFVETWQSFYRKKLKEVWKPAV

SEQ ID NO: 259 - protein, 978 aa, synthetic construct
QEIKRINKIRRRLVKDSNTKKAGKTGPMKTLLVRVMTPDLRERLENLRKKPENIPQPISNTSRANLNKLLTDYTEMKKAILHVYWEEFQKDPVGLMSRVAQPASKKIDQNKLKPEMDEKGNLTTAGFACSQCGQPLFVYKLEQVSEKGKAYTNYFGRCNVAEHEKLILLAQLKPEKDSDEAVTYSLGKFGQRALDFYSIHVTKESTHPVKPLAQIAGNRYASGPVGKALSDACMGTIASFLSKYQDIIIEHQKVVKGNQKRLESLRELAGKENLEYPSVTLPPQPHTKEGVDAYNEVIARVRMWVNLNLWQKLKLSRDDAKPLLRLKGFPSFPLVERQANEVDWWDMVCNVKKLINEKKEDGKVFWQNLAGYKRQEALRPYLSSEEDRKKGKKFARYQLGDLLLHLEKKHGEDWGKVYDEAWERIDKKVEGLSKHIKLEEERRSEDAQSKAALTDWLRAKASFVIEGLKEADKDEFCRCELKLQKWYGDLRGKPFAIEAENSILDISGFSKQYNCAFIWQKDGVKKLNLYLIINYFKGGKLRFKKIKPEAFEANRFYTVINKKSGEIVPMEVNFNFDDPNLIILPLAFGKRQGREFIWNDLLSLETGSLKLANGRVIEKTLYNRRTRQDEPALFVALTFERREVLDSSNIKPMNLIGVDRGENIPAVIALTDPEGCPLSRFKDSLGNPTHILRIGESYKEKQRTIQAKKEVEQRRAGGYSRKYASKAKNLADDMVRNTARDLLYYAVTQDAMLIFENLSRGFGRQGKRTFMAERQYTRMEDWLTAKLAYEGLPSKTYLSKTLAQYTPKTCSNCGFTITSADYDRVLEKLKKTATGWMTTINGKELKVEGQITYYNRYKRQNVVKDLSVELDRLSEESVNNDISSWTKGRSGEALSLLKKRFSHRPVQEKFVCLNCGFETHADEQAALNIARSWLFLRSQEYKKYQTNKTTGNTDKRAFVETWQSFYRKKLKEVWKPAV

SEQ ID NO: 260 - protein, 979 aa, synthetic construct
QEIKRINKIRRRLVKDSNTKKAGKTGPMKTLLVRVMTPDLRERLENLRKKPENIPQPISNTSRANLNKLLTDYTEMKKAILHVYWEEFQKDPVGLMSRVAQPASKKIDQNKLKPEMDEKGNLTTAGFACSQCGQPLFVYKLEQVSEKGKAYTNYFGRCNVAEHEKLILLAQLKPEKDSDEAVTYSLGKFGQRALDFYSIHVTKESTHPVKPLAQIAGNRYASGPVGKALSDACMGTIASFLSKYQDIIIEHQKVVKGNQKRLESLRELAGKENLEYPSVTLPPQPHTKEGVDAYNEVIARVRMWVNLNLWQKLKLSRDDAKPLLRLKGFPSFPLVERQANEVDWWDMVCNVKKLINEKKEDGKVFWQNLAGYKRQEALRPYLSSEEDRKKGKKFARYQLGDLLLHLEKKHGEDWGKVYDEAWERIDKKVEGLSKHIKLEEERRSEDAQSKAALTDWLRAKASFVIEGLKEADKDEFCRCELKLQKWYGDLRGKPFAIEAENSILDISGFSKQYNCAFIWQKDGVKKLNLYLIINYFKGGKLRFKKIKPEAFEANRFYTVINKKSGEIVPMEVNFNFDDPNLIILPLAFGKRQGREFIWNDLLSLETGSLKLANGRVIEKTLYNRRTRQDEPALFVALTFERREVLDSSNIKPMNLIGVDRGENIPAVIALTDPEGCPLSRFKDSLGNPTHILRIGESYKEKQRTIQAKKEVEQRRAGGYSRKYASKAKNLADDMVRNTARDLLYYAVTQDAMLIFENLSRGFGRQGKRTFMAERQYTRMEDWPLTAKLAYEGLPSKTYLSKTLAQYTSKTCSNCGFTITSADYDRVLEKLKKTATGWMTTINGKELKVEGQITYYNRYKRQNVVKDLSVELDRLSEESVNNDISSWTKGRSGEALSLLKKRFSHRPVQEKFVCLNCGFETHADEQAALNIARSWLFLRSQEYKKYQTNKTTGNTDKRAFVETWQSFYRKKLKEVWKPAV

SEQ ID NO: 261 - protein, 979 aa, synthetic construct
QEIKRINKIRRRLVKDSNTKKAGKTGPMKTLLVRVMTPDLRERLENLRKKPENIPQPISNTSRANLNKLLTDYTEMKKAILHVYWEEFQKDPVGLMSRVAQPASKKIDQNKLKPEMDEKGNLTTAGFACSQCGQPLFVYKLEQVSEKGKAYTNYFGRCNVAEHEKLILLAQLKPEKDSDEAVTYSLGKFGQRALDFYSIHVTKESTHPVKPLAQIAGNRYASGPVGKALSDACMGTIASFLSKYQDIIIEHQKVVKGNQKRLESLRELAGKENLEYPSVTLPPQPHTKEGVDAYNEVIARVRMWVNLNLWQKLKLSRDDAKPLLRLKGFPSFPLVERQANEVDWWDMVCNVKKLINEKKEDGKVFWQNLAGYKRQEALRPYLSSEEDRKKGKKFARYQLGDLLLHLEKKHGEDWGKVYDEAWERIDKKVEGLSKHIKLEEERRSEDAQSKAALTDWLRAKASFVIEGLKEADKDEFCRCELKLQKWYGDLRGKPFAIEAENSILDISGFSKQYNCAFIWQKDGVKKLNLYLIINYFKGGKLRFKKIKPEAFEANRFYTVINKKSGEIVPMEVNFNFDDPNLIILPLAFGKRQGREFIWNDLLSLETGSLKLANGRVIEKTLYNRRTRQDEPALFVALTFERREVLDSSNIKPMNLIGVDRGENIPAVIALTDPEGCPLSRFKDSLGNPTHILRIGESYKEKQRTIQAKKEVEQRRAGGYSRKYASKAKNLADDMVRNTARDLLYYAVTQDAMLIFENLSRGFGRQGKRTFMAERQYTRMEDWLTAKLAYEGLPSKTYLSKTLAQYTSKTCMSNCGFTITSADYDRVLEKLKKTATGWMTTINGKELKVEGQITYYNRYKRQNVVKDLSVELDRLSEESVNNDISSWTKGRSGEALSLLKKRFSHRPVQEKFVCLNCGFETHADEQAALNIARSWLFLRSQEYKKYQTNKTTGNTDKRAFVETWQSFYRKKLKEVWKPAV

SEQ ID NO: 262 - protein, 979 aa, synthetic construct
QEIKRINKIRRRLVKDSNTKKAGKTGPMKTLLVRVMTPDLRERLENLRKKPENIPQPISNTSRANLNKLLTDYTEMKKAILHVYWEEFQKDPVGLMSRVAQPASKKIDQNKLKPEMDEKGNLTTAGFACSQCGQPLFVYKLEQVSEKGKAYTNYFGRCNVAEHEKLILLAQLKPEKDSDEAVTYSLGKFGQRALDFYSIHVTKESTHPVKPLAQIAGNRYASGPVGKALSDACMGTIASFLSKYQDIIIEHQKVVKGNQKRLESLRELAGKENLEYPSVTLPPQPHTKEGVDAYNEVIARVRMWVNLNLWQKLKLSRDDAKPLLRLKGFPSFPLVERQANEVDWWDMVCNVKKLINEKKEDGKVFWQNLAGYKRQEALRPYLSSEEDRKKGKKFARYQLGDLLLHLEKKHGEDWGKVYDEAWERIDKKVEGLSKHIKLEEERRSEDAQSKAALTDWLRAKASFVIEGLKEADKDEFCRCELKLQKWYGDLRGKPFAIEAENSILDISGFSKQYNCAFIWQKDGVKKLNLYLIINYFKGGKLRFKKIKPEAFEANRFYTVINKKSGEIVPMEVNFNFDDPNLIILPLAFGKRQGREFIWNDLLSLETGSLKLANGRVIEKTLYNRRTRQDEPALFVALTFERREVLDSSNIKPMNLIGVDRGENIPAVIALTDPEGCPLSRFKDSLGNPTHILRIGESYKEKQRTIQAKKEVEQRRAGGYSRKYASKAKNLADDMVRNTARDLLYYAVTQDAMLIFENLSRGFGRQGKRTFMAERQYTRMEDWLTAKLARYEGLPSKTYLSKTLAQYTSKTCSNCGFTITSADYDRVLEKLKKTATGWMTTINGKELKVEGQITYYNRYKRQNVVKDLSVELDRLSEESVNNDISSWTKGRSGEALSLLKKRFSHRPVQEKFVCLNCGFETHADEQAALNIARSWLFLRSQEYKKYQTNKTTGNTDKRAFVETWQSFYRKKLKEVWKPAV

SEQ ID NO: 263 - protein, 978 aa, synthetic construct
QEIKRINKIRRRLVKDSNTKKAGKTGPMKTLLVRVMTPDLRERLENLRKKPENIPQPISNTSRANLNKLLTDYTEMKKAILHVYWEEFQKDPVGLMSRVAQPASKKIDQNKLKPEMDEKGNLTTAGFACSQCGQPLFVYKLEQVSEKGKAYTNYFGRCNVAEHEKLILLAQLKPEKDSDEAVTYSLGKFGQRALDFYSIHVTKESTHPVKPLAQIAGNRYASGPVGKALSDACMGTIASFLSKYQDIIIEHQKVVKGNQKRLESLRELAGKENLEYPSVTLPPQPHTKEGVDAYNEVIARVRMWVNLNLWQKLKLSRDDAKPLLRLKGFPSFPLVERQANEVDWWDMVCNVKKLINEKKEDGKVFWQNLAGYKRQEALRPYLSSEEDRKKGKKFARYQLGDLLLHLEKKHGEDWGKVYDEAWERIDKKVEGLSKHIKLEEERRSEDAQSKAALTDWLRAKASFVIEGLKEADKDEFCRCELKLQKWYGDLRGKPFAIEAENSILDISGFSKQYNCAFIWQKDGVKKLNLYLIINYFKGGKLRFKKIKPEAFEANRFYTVINKKSGEIVPMEVNFNFDDPNLIILPLAFGKRQGREFIWNDLLSLETGSLKLANGRVIEKTLYNRRTRQDEPALFVALTFERREVLDSSNIKPMNLIGVDRGENIPAVIALTDPEGCPLSRFKDSLGNPTHILRIGESYKEKQRTIQAKKEVEQRRAGGYSRKYASKAKNLADDMVRNTARDLLYYAVTQDAMLIFENLSRGFGRQGKRTFMAERQYTRMEDWLTAKLAYEGLPSKTYLSKTLAQYFSKTCSNCGFTITSADYDRVLEKLKKTATGWMTTINGKELKVEGQITYYNRYKRQNVVKDLSVELDRLSEESVNNDISSWTKGRSGEALSLLKKRFSHRPVQEKFVCLNCGFETHADEQAALNIARSWLFLRSQEYKKYQTNKTTGNTDKRAFVETWQSFYRKKLKEVWKPAV

SEQ ID NO: 264 - protein, 977 aa, synthetic construct
QEIKRINKIRRRLVKDSNTKKAGKTGPMKTLLVRVMTPDLRERLENLRKKPENIPQPISNTSRANLNKLLTDYTEMKKAILHVYWEEFQKDPVGLMSRVAQPASKKIDQNKLKPEMDEKGNLTTAGFACSQCGQPLFVYKLEQVSEKGKAYTNYFGRCNVAEHEKLILLAQLKPEKDSDEAVTYSLGKFGQRALDFYSIHVTKESTHPVKPLAQIAGNRYASGPVGKALSDACMGTIASFLSKYQDIIIEHQKVVKGNQKRLESLRELAGKENLEYPSVTLPPQPHTKEGVDAYNEVIARVRMWVNLNLWQKLKLSRDDAKPLLRLKGFPSFPLVERQANEVDWWDMVCNVKKLINEKKEDGKVFWQNLAGYKRQEALRPYLSSEEDRKKGKKFARYQLGDLLLHLEKKHGEDWGKVYDEAWERIDKKVEGLSKHIKLEEERRSEDAQSKAALTDWLRAKASFVIEGLKEADKDEFCRCELKLQKWYGDLRGKPFAIEAENSILDISGFSKQYNCAFIWQKDGVKKLNLYLIINYFKGGKLRFKKIKPEAFEANRFYTVINKKSGEIVPMEVNFNFDDPNLIILPLAFGKRQGREFIWNDLLSLETGSLKLANGRVIEKTLYNRRTRQDEPALFVALTFERREVLDSSNIKPMNLIGVDRGENIPAVIALTDPEGCPLSRFKDSLGNPTHILRIGESYKEKQRTIQAKKEVEQRRAGGYSRKYASKAKNLADDMVRNTARDLLYYAVTQDAMLIFENLSRGFGRQGKRTFMAERQYTRMEDWLTAKAYEGLPSKTYLSKTLAQYTSKTCSNCGFTITSADYDRVLEKLKKTATGWMTTINGKELKVEGQITYYNRYKRQNVVKDLSVELDRLSEESVNNDISSWTKGRSGEALSLLKKRFSHRPVQEKFVCLNCGFETHADEQAALNIARSWLFLRSQEYKKYQTNKTTGNTDKRAFVETWQSFYRKKLKEVWKPAV

SEQ ID NO: 265 - protein, 978 aa, synthetic construct
QEIKRINKIRRRLVKDSNTKKAGKTGPMKTLLVRVMTPDLRERLENLRKKPENIPQPISNTSRANLNKLLTDYTEMKKAILHVYWEEFQKDPVGLMSRVAQPASKKIDQNKLKPEMDEKGNLTTAGFACSQCGQPLFVYKLEQVSEKGKAYTNYFGRCNVAEHEKLILLAQLKPEKDSDEAVTYSLGKFGQRALDFYSIHVTKESTHPVKPLAQIAGNRYASGPVGKALSDACMGTIASFLSKYQDIIIEHQKVVKGNQKRLESLRELAGKENLEYPSVTLPPQPHTKEGVDAYNEVIARVRMWVNLNLWQKLKLSRDDAKPLLRLKGFPSFPLVERQANEVDWWDMVCNVKKLINEKKEDGKVFWQNLAGYKRQEALRPYLSSEEDRKKGKKFARYQLGDLLLHLEKKHGEDWGKVYDEAWERIDKKVEGLSKHIKLEEERRSEDAQSKAALTDWLRAKASFVIEGLKEADKDEFCRCELKLQKWYGDLRGKPFAIEAENSILDISGFSKQYNCAFIWQKDGVKKLNLYLIINYFKGGKLRFKKIKPEAFEANRFYTVINKKSGEIVPMEVNFNFDDPNLIILPLAFGKRQGREFIWNDLLSLETGSLKLANGRVIEKTLYNRRTRQDEPALFVALTFERREVLDSSNIKPMNLIGVDRGENIPAVIALTDPEGCPLSRFKDSLGNPTHILRIGESYKEKQRTIQAKKEVEQRRAGGYSRKYASKAKNLADDMVRNTARDLLYYAVTQDAMLIFENLSRGFGRQGKRTFMAERQYTRMEDWLTAKLAYEGLPSQTYLSKTLAQYTSKTCSNCGFTITSADYDRVLEKLKKTATGWMTTINGKELKVEGQITYYNRYKRQNVVKDLSVELDRLSEESVNNDISSWTKGRSGEALSLLKKRFSHRPVQEKFVCLNCGFETHADEQAALNIARSWLFLRSQEYKKYQTNKTTGNTDKRAFVETWQSFYRKKLKEVWKPAV

SEQ ID NO: 266 - protein, 978 aa, synthetic construct
QEIKRINKIRRRLVKDSNTKKAGKTGPMKTLLVRVMTPDLRERLENLRKKPENIPQPISNTSRANLNKLLTDYTEMKKAILHVYWEEFQKDPVGLMSRVAQPASKKIDQNKLKPEMDEKGNLTTAGFACSQCGQPLFVYKLEQVSEKGKAYTNYFGRCNVAEHEKLILLAQLKPEKDSDEAVTYSLGKFGQRALDFYSIHVTKESTHPVKPLAQIAGNRYASGPVGKALSDACMGTIASFLSKYQDIIIEHQKVVKGNQKRLESLRELAGKENLEYPSVTLPPQPHTKEGVDAYNEVIARVRMWVNLNLWQKLKLSRDDAKPLLRLKGFPSFPLVERQANEVDWWDMVCNVKKLINEKKEDGKVFWQNLAGYKRQEALRPYLSSEEDRKKGKKFARYQLGDLLLHLEKKHGEDWGKVYDEAWERIDKKVEGLSKHIKLEEERRSEDAQSKAALTDWLRAKASFVIEGLKEADKDEFCRCELKLQKWYGDLRGKPFAIEAENSILDISGFSKQYNCAFIWQKDGVKKLNLYLIINYFKGGKLRFKKIKPEAFEANRFYTVINKKSGEIVPMEVNFNFDDPNLIILPLAFGKRQGREFIWNDLLSLETGSLKLANGRVIEKTLYNRRTRQDEPALFVALTFERREVLDSSNIKPMNLIGVDRGENIPAVIALTDPEGCPLSRFKDSLGNPTHILRIGESYKEKQRTIQAKKEVEQRRAGGYSRKYASKAKNLADDMVRNTARDLLYYAVTQDAMLIFENLSRGFGRQGKRTFMAERQYTRMEDWLTAKLAYNGLPSKTYLSKTLAQYTSKTCSNCGFTITSADYDRVLEKLKKTATGWMTTINGKELKVEGQITYYNRYKRQNVVKDLSVELDRLSEESVNNDISSWTKGRSGEALSLLKKRFSHRPVQEKFVCLNCGFETHADEQAALNIARSWLFLRSQEYKKYQTNKTTGNTDKRAFVETWQSFYRKKLKEVWKPAV

SEQ ID NO: 267 - protein, 979 aa, synthetic construct
QEIKRINKIRRRLVKDSNTKKAGKTGPMKTLLVRVMTPDLRERLENLRKKPENIPQPISNTSRANLNKLLTDYTEMKKAILHVYWEEFQKDPVGLMSRVAQPASKKIDQNKLKPEMDEKGNLTTAGFACSQCGQPLFVYKLEQVSEKGKAYTNYFGRCNVAEHEKLILLAQLKPEKDSDEAVTYSLGKFGQRALDFYSIHVTKESTHPVKPLAQIAGNRYASGPVGKALSDACMGTIASFLSKYQDIIIEHQKVVKGNQKRLESLRELAGKENLEYPSVTLPPQPHTKEGVDAYNEVIARVRMWVNLNLWQKLKLSRDDAKPLLRLKGFPSFPLVERQANEVDWWDMVCNVKKLINEKKEDGKVFWQNLAGYKRQEALRPYLSSEEDRKKGKKFARYQLGDLLLHLEKKHGEDWGKVYDEAWERIDKKVEGLSKHIKLEEERRSEDAQSKAALTDWLRAKASFVIEGLKEADKDEFCRCELKLQKWYGDLRGKPFAIEAENSILDISGFSKQYNCAFIWQKDGVKKLNLYLIINYFKGGKLRFKKIKPEAFEANRFYTVINKKSGEIVPMEVNFNFDDPNLIILPLAFGKRQGREFIWNDLLSLETGSLKLANGRVIEKTLYNRRTRQDEPALFVALTFERREVLDSSNIKPMNLIGVDRGENIPAVIALTDPEGCPLSRFKDSLGNPTHILRIGESYKEKQRTIQAKKEVEQRRAGGYSRKYASKAKNLADDMVRNTARDLLYYAVTQDAMLIFENLSRGFGRQGKRTFMAERQYTRMEDWLTAKLAYEGLPSKTYLHSKTLAQYTSKTCSNCGFTITSADYDRVLEKLKKTATGWMTTINGKELKVEGQITYYNRYKRQNVVKDLSVELDRLSEESVNNDISSWTKGRSGEALSLLKKRFSHRPVQEKFVCLNCGFETHADEQAALNIARSWLFLRSQEYKKYQTNKTTGNTDKRAFVETWQSFYRKKLKEVWKPAV

SEQ ID NO: 268 - protein, 978 aa, synthetic construct
QEIKRINKIRRRLVKDSNTKKAGKTGPMKTLLVRVMTPDLRERLENLRKKPENIPQPISNTSRANLNKLLTDYTEMKKAILHVYWEEFQKDPVGLMSRVAQPASKKIDQNKLKPEMDEKGNLTTAGFACSQCGQPLFVYKLEQVSEKGKAYTNYFGRCNVAEHEKLILLAQLKPEKDSDEAVTYSLGKFGQRALDFYSIHVTKESTHPVKPLAQIAGNRYASGPVGKALSDACMGTIASFLSKYQDIIIEHQKVVKGNQKRLESLRELAGKENLEYPSVTLPPQPHTKEGVDAYNEVIARVRMWVNLNLWQKLKLSRDDAKPLLRLKGFPSFPLVERQANEVDWWDMVCNVKKLINEKKEDGKVFWQNLAGYKRQEALRPYLSSEEDRKKGKKFARYQLGDLLLHLEKKHGEDWGKVYDEAWERIDKKVEGLSKHIKLEEERRSEDAQSKAALTDWLRAKASFVIEGLKEADKDEFCRCELKLQKWYGDLRGKPFAIEAENSILDISGFSKQYNCAFIWQKDGVKKLNLYLIINYFKGGKLRFKKIKPEAFEANRFYTVINKKSGEIVPMEVNFNFDDPNLIILPLAFGKRQGREFIWNDLLSLETGSLKLANGRVIEKTLYNRRTRQDEPALFVALTFERREVLDSSNIKPMNLIGVDRGENIPAVIALTDPEGCPLSRFKDSLGNPTHILRIGESYKEKQRTIQAKKEVEQRRAGGYSRKYASKAKNLADDMVRNTARDLLYYAVTQDAMLIFENLSRGFGRQGKRTFMAERQYTRMEDWLTAKLAYEGLPSKVYLSKTLAQYTSKTCSNCGFTITSADYDRVLEKLKKTATGWMTTINGKELKVEGQITYYNRYKRQNVVKDLSVELDRLSEESVNNDISSWTKGRSGEALSLLKKRFSHRPVQEKFVCLNCGFETHADEQAALNIARSWLFLRSQEYKKYQTNKTTGNTDKRAFVETWQSFYRKKLKEVWKPAV

SEQ ID NO: 269 - protein, 979 aa, synthetic construct
QEIKRINKIRRRLVKDSNTKKAGKTGPMKTLLVRVMTPDLRERLENLRKKPENIPQPISNTSRANLNKLLTDYTEMKKAILHVYWEEFQKDPVGLMSRVAQPASKKIDQNKLKPEMDEKGNLTTAGFACSQCGQPLFVYKLEQVSEKGKAYTNYFGRCNVAEHEKLILLAQLKPEKDSDEAVTYSLGKFGQRALDFYSIHVTKESTHPVKPLAQIAGNRYASGPVGKALSDACMGTIASFLSKYQDIIIEHQKVVKGNQKRLESLRELAGKENLEYPSVTLPPQPHTKEGVDAYNEVIARVRMWVNLNLWQKLKLSRDDAKPLLRLKGFPSFPLVERQANEVDWWDMVCNVKKLINEKKEDGKVFWQNLAGYKRQEALRPYLSSEEDRKKGKKFARYQLGDLLLHLEKKHGEDWGKVYDEAWERIDKKVEGLSKHIKLEEERRSEDAQSKAALTDWLRAKASFVIEGLKEADKDEFCRCELKLQKWYGDLRGKPFAIEAENSILDISGFSKQYNCAFIWQKDGVKKLNLYLIINYFKGGKLRFKKIKPEAFEANRFYTVINKKSGEIVPMEVNFNFDDPNLIILPLAFGKRQGREFIWNDLLSLETGSLKLANGRVIEKTLYNRRTRQDEPALFVALTFERREVLDSSNIKPMNLIGVDRGENIPAVIALTDPEGCPLSRFKDSLGNPTHILRIGESYKEKQRTIQAKKEVEQRRAGGYSRKYASKAKNLADDMVRNTARDLLYYAVTQDAMLIFENLSRGFGRQGKRTFMAERQYTRMEDWLTAKLQAYEGLPSKTYLSKTLAQYTSKTCSNCGFTITSADYDRVLEKLKKTATGWMTTINGKELKVEGQITYYNRYKRQNVVKDLSVELDRLSEESVNNDISSWTKGRSGEALSLLKKRFSHRPVQEKFVCLNCGFETHADEQAALNIARSWLFLRSQEYKKYQTNKTTGNTDKRAFVETWQSFYRKKLKEVWKPAV

SEQ ID NO: 270 - protein, 979 aa, synthetic construct
QEIKRINKIRRRLVKDSNTKKAGKTGPMKTLLVRVMTPDLRERLENLRKKPENIPQPISNTSRANLNKLLTDYTEMKKAILHVYWEEFQKDPVGLMSRVAQPASKKIDQNKLKPEMDEKGNLTTAGFACSQCGQPLFVYKLEQVSEKGKAYTNYFGRCNVAEHEKLILLAQLKPEKDSDEAVTYSLGKFGQRALDFYSIHVTKESTHPVKPLAQIAGNRYASGPVGKALSDACMGTIASFLSKYQDIIIEHQKVVKGNQKRLESLRELAGKENLEYPSVTLPPQPHTKEGVDAYNEVIARVRMWVNLNLWQKLKLSRDDAKPLLRLKGFPSFPLVERQANEVDWWDMVCNVKKLINEKKEDGKVFWQNLAGYKRQEALRPYLSSEEDRKKGKKFARYQLGDLLLHLEKKHGEDWGKVYDEAWERIDKKVEGLSKHIKLEEERRSEDAQSKAALTDWLRAKASFVIEGLKEADKDEFCRCELKLQKWYGDLRGKPFAIEAENSILDISGFSKQYNCAFIWQKDGVKKLNLYLIINYFKGGKLRFKKIKPEAFEANRFYTVINKKSGEIVPMEVNFNFDDPNLIILPLAFGKRQGREFIWNDLLSLETGSLKLANGRVIEKTLYNRRTRQDEPALFVALTFERREVLDSSNIKPMNLIGVDRGENIPAVIALTDPEGCPLSRFKDSLGNPTHILRIGESYKEKQRTIQAKKEVEQRRAGGYSRKYASKAKNLADDMVRNTARDLLYYAVTQDAMLIFENLSRGFGRQGKRTFMAERQYTRMEDWLTAKLAYEGPLPSKTYLSKTLAQYTSKTCSNCGFTITSADYDRVLEKLKKTATGWMTTINGKELKVEGQITYYNRYKRQNVVKDLSVELDRLSEESVNNDISSWTKGRSGEALSLLKKRFSHRPVQEKFVCLNCGFETHADEQAALNIARSWLFLRSQEYKKYQTNKTTGNTDKRAFVETWQSFYRKKLKEVWKPAV

SEQ ID NO: 271 - protein, 979 aa, synthetic construct
QEIKRINKIRRRLVKDSNTKKAGKTGPMKTLLVRVMTPDLRERLENLRKKPENIPQPISNTSRANLNKLLTDYTEMKKAILHVYWEEFQKDPVGLMSRVAQPASKKIDQNKLKPEMDEKGNLTTAGFACSQCGQPLFVYKLEQVSEKGKAYTNYFGRCNVAEHEKLILLAQLKPEKDSDEAVTYSLGKFGQRALDFYSIHVTKESTHPVKPLAQIAGNRYASGPVGKALSDACMGTIASFLSKYQDIIIEHQKVVKGNQKRLESLRELAGKENLEYPSVTLPPQPHTKEGVDAYNEVIARVRMWVNLNLWQKLKLSRDDAKPLLRLKGFPSFPLVERQANEVDWWDMVCNVKKLINEKKEDGKVFWQNLAGYKRQEALRPYLSSEEDRKKGKKFARYQLGDLLLHLEKKHGEDWGKVYDEAWERIDKKVEGLSKHIKLEEERRSEDAQSKAALTDWLRAKASFVIEGLKEADKDEFCRCELKLQKWYGDLRGKPFAIEAENSILDISGFSKQYNCAFIWQKDGVKKLNLYLIINYFKGGKLRFKKIKPEAFEANRFYTVINKKSGEIVPMEVNFNFDDPNLIILPLAFGKRQGREFIWNDLLSLETGSLKLANGRVIEKTLYNRRTRQDEPALFVALTFERREVLDSSNIKPMNLIGVDRGENIPAVIALTDPEGCPLSRFKDSLGNPTHILRIGESYKEKQRTIQAKKEVEQRRAGGYSRKYASKAKNLADDMVRNTARDLLYYAVTQDAMLIFENLSRGFGRQGKRTFMAERQYTRMEDWLTAKLAYEGLPSKTYLSKRTLAQYTSKTCSNCGFTITSADYDRVLEKLKKTATGWMTTINGKELKVEGQITYYNRYKRQNVVKDLSVELDRLSEESVNNDISSWTKGRSGEALSLLKKRFSHRPVQEKFVCLNCGFETHADEQAALNIARSWLFLRSQEYKKYQTNKTTGNTDKRAFVETWQSFYRKKLKEVWKPAV

SEQ ID NO: 272 - protein, 979 aa, synthetic construct
QEIKRINKIRRRLVKDSNTKKAGKTGPMKTLLVRVMTPDLRERLENLRKKPENIPQPISNTSRANLNKLLTDYTEMKKAILHVYWEEFQKDPVGLMSRVAQPASKKIDQNKLKPEMDEKGNLTTAGFACSQCGQPLFVYKLEQVSEKGKAYTNYFGRCNVAEHEKLILLAQLKPEKDSDEAVTYSLGKFGQRALDFYSIHVTKESTHPVKPLAQIAGNRYASGPVGKALSDACMGTIASFLSKYQDIIIEHQKVVKGNQKRLESLRELAGKENLEYPSVTLPPQPHTKEGVDAYNEVIARVRMWVNLNLWQKLKLSRDDAKPLLRLKGFPSFPLVERQANEVDWWDMVCNVKKLINEKKEDGKVFWQNLAGYKRQEALRPYLSSEEDRKKGKKFARYQLGDLLLHLEKKHGEDWGKVYDEAWERIDKKVEGLSKHIKLEEERRSEDAQSKAALTDWLRAKASFVIEGLKEADKDEFCRCELKLQKWYGDLRGKPFAIEAENSILDISGFSKQYNCAFIWQKDGVKKLNLYLIINYFKGGKLRFKKIKPEAFEANRFYTVINKKSGEIVPMEVNFNFDDPNLIILPLAFGKRQGREFIWNDLLSLETGSLKLANGRVIEKTLYNRRTRQDEPALFVALTFERREVLDSSNIKPMNLIGVDRGENIPAVIALTDPEGCPLSRFKDSLGNPTHILRIGESYKEKQRTIQAKKEVEQRRAGGYSRKYASKAKNLADDMVRNTARDLLYYAVTQDAMLIFENLSRGFGRQGKRTFMAERQYTRMEDWLTAKLAYEGLPSKTYLSKTLAQYTSKTCSNCWGFTITSADYDRVLEKLKKTATGWMTTINGKELKVEGQITYYNRYKRQNVVKDLSVELDRLSEESVNNDISSWTKGRSGEALSLLKKRFSHRPVQEKFVCLNCGFETHADEQAALNIARSWLFLRSQEYKKYQTNKTTGNTDKRAFVETWQSFYRKKLKEVWKPAV

SEQ ID NO: 273 - protein, 979 aa, synthetic construct
QEIKRINKIRRRLVKDSNTKKAGKTGPMKTLLVRVMTPDLRERLENLRKKPENIPQPISNTSRANLNKLLTDYTEMKKAILHVYWEEFQKDPVGLMSRVAQPASKKIDQNKLKPEMDEKGNLTTAGFACSQCGQPLFVYKLEQVSEKGKAYTNYFGRCNVAEHEKLILLAQLKPEKDSDEAVTYSLGKFGQRALDFYSIHVTKESTHPVKPLAQIAGNRYASGPVGKALSDACMGTIASFLSKYQDIIIEHQKVVKGNQKRLESLRELAGKENLEYPSVTLPPQPHTKEGVDAYNEVIARVRMWVNLNLWQKLKLSRDDAKPLLRLKGFPSFPLVERQANEVDWWDMVCNVKKLINEKKEDGKVFWQNLAGYKRQEALRPYLSSEEDRKKGKKFARYQLGDLLLHLEKKHGEDWGKVYDEAWERIDKKVEGLSKHIKLEEERRSEDAQSKAALTDWLRAKASFVIEGLKEADKDEFCRCELKLQKWYGDLRGKPFAIEAENSILDISGFSKQYNCAFIWQKDGVKKLNLYLIINYFKGGKLRFKKIKPEAFEANRFYTVINKKSGEIVPMEVNFNFDDPNLIILPLAFGKRQGREFIWNDLLSLETGSLKLANGRVIEKTLYNRRTRQDEPALFVALTFERREVLDSSNIKPMNLIGVDRGENIPAVIALTDPEGCPLSRFKDSLGNPTHILRIGESYKEKQRTIQAKKEVEQRRAGGYSRKYASKAKNLADDMVRNTARDLLYYAVTQDAMLIFENLSRGFGRQGKRTFMAERQYTRMEDWLTAKLANYEGLPSKTYLSKTLAQYTSKTCSNCGFTITSADYDRVLEKLKKTATGWMTTINGKELKVEGQITYYNRYKRQNVVKDLSVELDRLSEESVNNDISSWTKGRSGEALSLLKKRFSHRPVQEKFVCLNCGFETHADEQAALNIARSWLFLRSQEYKKYQTNKTTGNTDKRAFVETWQSFYRKKLKEVWKPAV

SEQ ID NO: 274 - protein, 978 aa, synthetic construct
QEIKRINKIRRRLVKDSNTKKAGKTGPMKTLLVRVMTPDLRERLENLRKKPENIPQPISNTSRANLNKLLTDYTEMKKAILHVYWEEFQKDPVGLMSRVAQPASKKIDQNKLKPEMDEKGNLTTAGFACSQCGQPLFVYKLEQVSEKGKAYTNYFGRCNVAEHEKLILLAQLKPEKDSDEAVTYSLGKFGQRALDFYSIHVTKESTHPVKPLAQIAGNRYASGPVGKALSDACMGTIASFLSKYQDIIIEHQKVVKGNQKRLESLRELAGKENLEYPSVTLPPQPHTKEGVDAYNEVIARVRMWVNLNLWQKLKLSRDDAKPLLRLKGFPSFPLVERQANEVDWWDMVCNVKKLINEKKEDGKVFWQNLAGYKRQEALRPYLSSEEDRKKGKKFARYQLGDLLLHLEKKHGEDWGKVYDEAWERIDKKVEGLSKHIKLEEERRSEDAQSKAALTDWLRAKASFVIEGLKEADKDEFCRCELKLQKWYGDLRGKPFAIEAENSILDISGFSKQYNCAFIWQKDGVKKLNLYLIINYFKGGKLRFKKIKPEAFEANRFYTVINKKSGEIVPMEVNFNFDDPNLIILPLAFGKRQGREFIWNDLLSLETGSLKLANGRVIEKTLYNRRTRQDEPALFVALTFERREVLDSSNIKPMNLIGVDRGENIPAVIALTDPEGCPLSRFKDSLGNPTHILRIGESYKEKQRTIQAKKEVEQRRAGGYSRKYASKAKNLADDMVRNTARDLLYYAVTQDAMLIFENLSRGFGRQGKRTFMAERQYTRMEDWLTAKLAYEGLPSKTYLSKTLAQYTSKTCSNSGFTITSADYDRVLEKLKKTATGWMTTINGKELKVEGQITYYNRYKRQNVVKDLSVELDRLSEESVNNDISSWTKGRSGEALSLLKKRFSHRPVQEKFVCLNCGFETHADEQAALNIARSWLFLRSQEYKKYQTNKTTGNTDKRAFVETWQSFYRKKLKEVWKPAV

SEQ ID NO: 275 - protein, 978 aa, synthetic construct
QEIKRINKIRRRLVKDSNTKKAGKTGPMKTLLVRVMTPDLRERLENLRKKPENIPQPISNTSRANLNKLLTDYTEMKKAILHVYWEEFQKDPVGLMSRVAQPASKKIDQNKLKPEMDEKGNLTTAGFACSQCGQPLFVYKLEQVSEKGKAYTNYFGRCNVAEHEKLILLAQLKPEKDSDEAVTYSLGKFGQRALDFYSIHVTKESTHPVKPLAQIAGNRYASGPVGKALSDACMGTIASFLSKYQDIIIEHQKVVKGNQKRLESLRELAGKENLEYPSVTLPPQPHTKEGVDAYNEVIARVRMWVNLNLWQKLKLSRDDAKPLLRLKGFPSFPLVERQANEVDWWDMVCNVKKLINEKKEDGKVFWQNLAGYKRQEALRPYLSSEEDRKKGKKFARYQLGDLLLHLEKKHGEDWGKVYDEAWERIDKKVEGLSKHIKLEEERRSEDAQSKAALTDWLRAKASFVIEGLKEADKDEFCRCELKLQKWYGDLRGKPFAIEAENSILDISGFSKQYNCAFIWQKDGVKKLNLYLIINYFKGGKLRFKKIKPEAFEANRFYTVINKKSGEIVPMEVNFNFDDPNLIILPLAFGKRQGREFIWNDLLSLETGSLKLANGRVIEKTLYNRRTRQDEPALFVALTFERREVLDSSNIKPMNLIGVDRGENIPAVIALTDPEGCPLSRFKDSLGNPTHILRIGESYKEKQRTIQAKKEVEQRRAGGYSRKYASKAKNLADDMVRNTARDLLYYAVTQDAMLIFENLSRGFGRQGKRTFMAERQYTRMEDWLTAKLAYEGLPSKTYLSKTLSQYTSKTCSNCGFTITSADYDRVLEKLKKTATGWMTTINGKELKVEGQITYYNRYKRQNVVKDLSVELDRLSEESVNNDISSWTKGRSGEALSLLKKRFSHRPVQEKFVCLNCGFETHADEQAALNIARSWLFLRSQEYKKYQTNKTTGNTDKRAFVETWQSFYRKKLKEVWKPAV

SEQ ID NO: 276 - protein, 979 aa, synthetic construct
QEIKRINKIRRRLVKDSNTKKAGKTGPMKTLLVRVMTPDLRERLENLRKKPENIPQPISNTSRANLNKLLTDYTEMKKAILHVYWEEFQKDPVGLMSRVAQPASKKIDQNKLKPEMDEKGNLTTAGFACSQCGQPLFVYKLEQVSEKGKAYTNYFGRCNVAEHEKLILLAQLKPEKDSDEAVTYSLGKFGQRALDFYSIHVTKESTHPVKPLAQIAGNRYASGPVGKALSDACMGTIASFLSKYQDIIIEHQKVVKGNQKRLESLRELAGKENLEYPSVTLPPQPHTKEGVDAYNEVIARVRMWVNLNLWQKLKLSRDDAKPLLRLKGFPSFPLVERQANEVDWWDMVCNVKKLINEKKEDGKVFWQNLAGYKRQEALRPYLSSEEDRKKGKKFARYQLGDLLLHLEKKHGEDWGKVYDEAWERIDKKVEGLSKHIKLEEERRSEDAQSKAALTDWLRAKASFVIEGLKEADKDEFCRCELKLQKWYGDLRGKPFAIEAENSILDISGFSKQYNCAFIWQKDGVKKLNLYLIINYFKGGKLRFKKIKPEAFEANRFYTVINKKSGEIVPMEVNFNFDDPNLIILPLAFGKRQGREFIWNDLLSLETGSLKLANGRVIEKTLYNRRTRQDEPALFVALTFERREVLDSSNIKPMNLIGVDRGENIPAVIALTDPEGCPLSRFKDSLGNPTHILRIGESYKEKQRTIQAKKEVEQRRAGGYSRKYASKAKNLADDMVRNTARDLLYYAVTQDAMLIFENLSRGFGRQGKRTFMAERQYTRMEDWLTAKLAYEGLPSKTYRLSKTLAQYTSKTCSNCGFTITSADYDRVLEKLKKTATGWMTTINGKELKVEGQITYYNRYKRQNVVKDLSVELDRLSEESVNNDISSWTKGRSGEALSLLKKRFSHRPVQEKFVCLNCGFETHADEQAALNIARSWLFLRSQEYKKYQTNKTTGNTDKRAFVETWQSFYRKKLKEVWKPAV

SEQ ID NO: 277 - protein, 978 aa, synthetic construct
QEIKRINKIRRRLVKDSNTKKAGKTGPMKTLLVRVMTPDLRERLENLRKKPENIPQPISNTSRANLNKLLTDYTEMKKAILHVYWEEFQKDPVGLMSRVAQPASKKIDQNKLKPEMDEKGNLTTAGFACSQCGQPLFVYKLEQVSEKGKAYTNYFGRCNVAEHEKLILLAQLKPEKDSDEAVTYSLGKFGQRALDFYSIHVTKESTHPVKPLAQIAGNRYASGPVGKALSDACMGTIASFLSKYQDIIIEHQKVVKGNQKRLESLRELAGKENLEYPSVTLPPQPHTKEGVDAYNEVIARVRMWVNLNLWQKLKLSRDDAKPLLRLKGFPSFPLVERQANEVDWWDMVCNVKKLINEKKEDGKVFWQNLAGYKRQEALRPYLSSEEDRKKGKKFARYQLGDLLLHLEKKHGEDWGKVYDEAWERIDKKVEGLSKHIKLEEERRSEDAQSKAALTDWLRAKASFVIEGLKEADKDEFCRCELKLQKWYGDLRGKPFAIEAENSILDISGFSKQYNCAFIWQKDGVKKLNLYLIINYFKGGKLRFKKIKPEAFEANRFYTVINKKSGEIVPMEVNFNFDDPNLIILPLAFGKRQGREFIWNDLLSLETGSLKLANGRVIEKTLYNRRTRQDEPALFVALTFERREVLDSSNIKPMNLIGVDRGENIPAVIALTDPEGCPLSRFKDSLGNPTHILRIGESYKEKQRTIQAKKEVEQRRAGGYSRKYASKAKNLADDMVRNTARDLLYYAVTQDAMLIFENLSRGFGRQGKRTFMAERQYTRMEDWLTAKRAYEGLPSKTYLSKTLAQYTSKTCSNCGFTITSADYDRVLEKLKKTATGWMTTINGKELKVEGQITYYNRYKRQNVVKDLSVELDRLSEESVNNDISSWTKGRSGEALSLLKKRFSHRPVQEKFVCLNCGFETHADEQAALNIARSWLFLRSQEYKKYQTNKTTGNTDKRAFVETWQSFYRKKLKEVWKPAV

SEQ ID NO: 278 - protein, 978 aa, synthetic construct
QEIKRINKIRRRLVKDSNTKKAGKTGPMKTLLVRVMTPDLRERLENLRKKPENIPQPISNTSRANLNKLLTDYTEMKKAILHVYWEEFQKDPVGLMSRVAQPASKKIDQNKLKPEMDEKGNLTTAGFACSQCGQPLFVYKLEQVSEKGKAYTNYFGRCNVAEHEKLILLAQLKPEKDSDEAVTYSLGKFGQRALDFYSIHVTKESTHPVKPLAQIAGNRYASGPVGKALSDACMGTIASFLSKYQDIIIEHQKVVKGNQKRLESLRELAGKENLEYPSVTLPPQPHTKEGVDAYNEVIARVRMWVNLNLWQKLKLSRDDAKPLLRLKGFPSFPLVERQANEVDWWDMVCNVKKLINEKKEDGKVFWQNLAGYKRQEALRPYLSSEEDRKKGKKFARYQLGDLLLHLEKKHGEDWGKVYDEAWERIDKKVEGLSKHIKLEEERRSEDAQSKAALTDWLRAKASFVIEGLKEADKDEFCRCELKLQKWYGDLRGKPFAIEAENSILDISGFSKQYNCAFIWQKDGVKKLNLYLIINYFKGGKLRFKKIKPEAFEANRFYTVINKKSGEIVPMEVNFNFDDPNLIILPLAFGKRQGREFIWNDLLSLETGSLKLANGRVIEKTLYNRRTRQDEPALFVALTFERREVLDSSNIKPMNLIGVDRGENIPAVIALTDPEGCPLSRFKDSLGNPTHILRIGESYKEKQRTIQAKKEVEQRRAGGYSRKYASKAKNLADDMVRNTARDLLYYAVTQDAMLIFENLSRGFGRQGKRTFMAERQYTRMEDWLTAKDAYEGLPSKTYLSKTLAQYTSKTCSNCGFTITSADYDRVLEKLKKTATGWMTTINGKELKVEGQITYYNRYKRQNVVKDLSVELDRLSEESVNNDISSWTKGRSGEALSLLKKRFSHRPVQEKFVCLNCGFETHADEQAALNIARSWLFLRSQEYKKYQTNKTTGNTDKRAFVETWQSFYRKKLKEVWKPAV

SEQ ID NO: 279 - protein, 979 aa, synthetic construct
QEIKRINKIRRRLVKDSNTKKAGKTRGPMKTLLVRVMTPDLRERLENLRKKPENIPQPISNTSRANLNKLLTDYTEMKKAILHVYWEEFQKDPVGLMSRVAQPASKKIDQNKLKPEMDEKGNLTTAGFACSQCGQPLFVYKLEQVSEKGKAYTNYFGRCNVAEHEKLIKLAQLKPEKDSDEAVTYSLGKFGQRALDFYSIHVTKESTHPVKPLAQIAGNRYASNPVGKALSDACMGTIASFLSKYQDIIIEHQKVVKGNQKRLESLRELAGKENLEYPSVTLPPQPHTKEGVDAYNEVIARVRMWVNLNLWQKLKLSRDDAKPLLRLKGFPSFPLVERQANEVDWWDMVCNVKKLINEKKEDGKVFWQNLAGYKRQEALRPYLSSEEDRKKGKKFARYQLGDLLLHLEKKHGEDWGKVYDEAWERIDKKVEGLSKHIKLEEERRSEDAQSKAALTDWLRAKASFVIEGLKEADKDEFCRCELKLQKWYGDLRGKPFAIEAENSILDISGFSKQYNCAFIWQKDGVKKLNLYLIINYFKGGKLRFKKIKPEAFEANRFYTVINKKSGEIVPMEVNFNFDDPNLIILPLAFGKRQGREFIWNDLLSLETGSLKLANGRVIEKTLYNRRTRQDEPALFVALTFERREVLDSSNIKPMNLIGVDRGENIPAVIALTDPEGCPLSRFKDSLGNPTHILRIGESYKEKQRTIQAKKEVEQRRAGGYSRKYASKAKNLADDMVRNTARDLLYYAVTQDAMLIFENLSRGFGRQGKRTFMAERQYTRMEDWLTAKLAYEGLPSKTYLSKTLAQYTSKTCSNCGFTITSADYDRVLEKLKKTATGWMTTINGKELKVEGQITYYNRYKRQNVVKDLSVELDRLSEESVNNDISSWTKGRSGEALSLLKKRFSHRPVQEKFVCLNCGFETHADEQAALNIARSWLFLRSQEYKKYQTNKTTGNTDKRAFVETWQSFYRKKLKEVWKPAV

SEQ ID NO: 280 - protein, 979 aa, synthetic construct
QEIKRINKIRRRLVKDSNTKKAGKTRGPMKTLLVRVMTPDLRERLENLRKKPENIPQPISNTSRANLNKLLTDYTEMKKAILHVYWEEFQKDPVGLMSRVAQPASKKIDQNKLKPEMDEKGNLTTAGFACSQCGQPLFVYKLEQVSEKGKAYTNYFGRCNVAEHEKLIKLAQLKPEKDSDEAVTYSLGKFGQRALDFYSIHVTKESTHPVKPLAQIAGNRYASTPVGKALSDACMGTIASFLSKYQDIIIEHQKVVKGNQKRLESLRELAGKENLEYPSVTLPPQPHTKEGVDAYNEVIARVRMWVNLNLWQKLKLSRDDAKPLLRLKGFPSFPLVERQANEVDWWDMVCNVKKLINEKKEDGKVFWQNLAGYKRQEALRPYLSSEEDRKKGKKFARYQLGDLLLHLEKKHGEDWGKVYDEAWERIDKKVEGLSKHIKLEEERRSEDAQSKAALTDWLRAKASFVIEGLKEADKDEFCRCELKLQKWYGDLRGKPFAIEAENSILDISGFSKQYNCAFIWQKDGVKKLNLYLIINYFKGGKLRFKKIKPEAFEANRFYTVINKKSGEIVPMEVNFNFDDPNLIILPLAFGKRQGREFIWNDLLSLETGSLKLANGRVIEKTLYNRRTRQDEPALFVALTFERREVLDSSNIKPMNLIGVDRGENIPAVIALTDPEGCPLSRFKDSLGNPTHILRIGESYKEKQRTIQAKKEVEQRRAGGYSRKYASKAKNLADDMVRNTARDLLYYAVTQDAMLIFENLSRGFGRQGKRTFMAERQYTRMEDWLTAKLAYEGLPSKTYLSKTLAQYTSKTCSNCGFTITSADYDRVLEKLKKTATGWMTTINGKELKVEGQITYYNRYKRQNVVKDLSVELDRLSEESVNNDISSWTKGRSGEALSLLKKRFSHRPVQEKFVCLNCGFETHADEQAALNIARSWLFLRSQEYKKYQTNKTTGNTDKRAFVETWQSFYRKKLKEVWKPAV

SEQ ID NO: 281 - protein, 979 aa, synthetic construct
QEIKRINKIRRRLVKDSNTKKAGKTRGPMKTLLVRVMTPDLRERLENLRKKPENIPQPISNTSRANLNKLLTDYTEMKKAILHVYWEEFQKDPVGLMSRVAQPASKKIDQNKLKPEMDEKGNLTTAGFACSQCGQPLFVYKLEQVSEKGKAYTNYFGRCNVAEHEKLIKLAQLKPEKDSDEAVTYSLGKFGQRALDFYSIHVTKESTHPVKPLAQIAGNRYASAPVGKALSDACMGTIASFLSKYQDIIIEHQKVVKGNQKRLESLRELAGKENLEYPSVTLPPQPHTKEGVDAYNEVIARVRMWVNLNLWQKLKLSRDDAKPLLRLKGFPSFPLVERQANEVDWWDMVCNVKKLINEKKEDGKVFWQNLAGYKRQEALRPYLSSEEDRKKGKKFARYQLGDLLLHLEKKHGEDWGKVYDEAWERIDKKVEGLSKHIKLEEERRSEDAQSKAALTDWLRAKASFVIEGLKEADKDEFCRCELKLQKWYGDLRGKPFAIEAENSILDISGFSKQYNCAFIWQKDGVKKLNLYLIINYFKGGKLRFKKIKPEAFEANRFYTVINKKSGEIVPMEVNFNFDDPNLIILPLAFGKRQGREFIWNDLLSLETGSLKLANGRVIEKTLYNRRTRQDEPALFVALTFERREVLDSSNIKPMNLIGVDRGENIPAVIALTDPEGCPLSRFKDSLGNPTHILRIGESYKEKQRTIQAKKEVEQRRAGGYSRKYASKAKNLADDMVRNTARDLLYYAVTQDAMLIFENLSRGFGRQGKRTFMAERQYTRMEDWLTAKLAYEGLPSKTYLSKTLAQYTSKTCSNCGFTITSADYDRVLEKLKKTATGWMTTINGKELKVEGQITYYNRYKRQNVVKDLSVELDRLSEESVNNDISSWTKGRSGEALSLLKKRFSHRPVQEKFVCLNCGFETHADEQAALNIARSWLFLRSQEYKKYQTNKTTGNTDKRAFVETWQSFYRKKLKEVWKPAV

SEQ ID NO: 282 - protein, 979 aa, synthetic construct
QEIKRINKIRRRLVKDSNTKKAGKTRGPMKTLLVRVMTPDLRERLENLRKKPENIPQPISNTSRANLNKLLTDYTEMKKAILHVYWEEFQKDPVGLMSRVAQPASKKIDQNKLKPEMDEKGNLTTAGFACSQCGQPLFVYKLEQVSEKGKAYTNYFGRCNVAEHEKLIKLAQLKPEKDSDEAVTYSLGKFGQRALDFYSIHVTKESTHPVKPLAQIAGNRYASVPVGKALSDACMGTIASFLSKYQDIIIEHQKVVKGNQKRLESLRELAGKENLEYPSVTLPPQPHTKEGVDAYNEVIARVRMWVNLNLWQKLKLSRDDAKPLLRLKGFPSFPLVERQANEVDWWDMVCNVKKLINEKKEDGKVFWQNLAGYKRQEALRPYLSSEEDRKKGKKFARYQLGDLLLHLEKKHGEDWGKVYDEAWERIDKKVEGLSKHIKLEEERRSEDAQSKAALTDWLRAKASFVIEGLKEADKDEFCRCELKLQKWYGDLRGKPFAIEAENSILDISGFSKQYNCAFIWQKDGVKKLNLYLIINYFKGGKLRFKKIKPEAFEANRFYTVINKKSGEIVPMEVNFNFDDPNLIILPLAFGKRQGREFIWNDLLSLETGSLKLANGRVIEKTLYNRRTRQDEPALFVALTFERREVLDSSNIKPMNLIGVDRGENIPAVIALTDPEGCPLSRFKDSLGNPTHILRIGESYKEKQRTIQAKKEVEQRRAGGYSRKYASKAKNLADDMVRNTARDLLYYAVTQDAMLIFENLSRGFGRQGKRTFMAERQYTRMEDWLTAKLAYEGLPSKTYLSKTLAQYTSKTCSNCGFTITSADYDRVLEKLKKTATGWMTTINGKELKVEGQITYYNRYKRQNVVKDLSVELDRLSEESVNNDISSWTKGRSGEALSLLKKRFSHRPVQEKFVCLNCGFETHADEQAALNIARSWLFLRSQEYKKYQTNKTTGNTDKRAFVETWQSFYRKKLKEVWKPAV

SEQ ID NO: 283 - protein, 978 aa, synthetic construct
QEIKRINKIRRRLVKDSNTKKAGKTGPMKTLLVRVMTPDLRERLENLRKKPENIPQPISNTSRANLNKLLTDYTEMKKAILHVYWEEFQKDPVGLMSRVAQPASKKIDQNKLKPEMDEKGNLTTAGFACSQCGQPLFVYKLEQVSEKGKAYTNYFGRCNVAEHEKLIQLAQLKPEKDSDEAVTYSLGKFGQRALDFYSIHVTKESTHPVKPLAQIAGNRYASGPVGKALSDACMGTIASFLSKYQDIIIEHQKVVKGNQKRLESLRELAGKENLEYPSVTLPPQPHTKEGVDAYNEVIARVRMWVNLNLWQKLKLSRDDAKPLLRLKGFPSFPLVERQANEVDWWDMVCNVKKLINEKKEDGKVFWQNLAGYKRQEALRPYLSSEEDRKKGKKFARYQLGDLLLHLEKKHGEDWGKVYDEAWERIDKKVEGLSKHIKLEEERRSEDAQSKAALTDWLRAKASFVIEGLKEADKDEFCRCELKLQKWYGDLRGKPFAIEAENSILDISGFSKQYNCAFIWQKDGVKKLNLYLIINYFKGGKLRFKKIKPEAFEANRFYTVINKKSGEIVPMEVNFNFDDPNLIILPLAFGKRQGREFIWNDLLSLETGSLKLANGRVIEKTLYNRRTRQDEPALFVALTFERREVLDSSNIKPMNLIGVDRGENIPAVIALTDPEGCPLSRFKDSLGNPTHILRIGESYKEKQRTIQAKKEVEQRRAGGYSRKYASKAKNLADDMVRNTARDLLYYAVTQDAMLIFENLSRGFGRQGKRTFMAERQYTRMEDWLTAKLAYEGLPSKTYLSKTLAQYTSKTCSNCGFTITSADYDRVLEKLKKTATGWMTTINGKELKVEGQITYYNRYKRQNVVKDLSVELDRLSEESVNNDISSWTKGRSGEALSLLKKRFSHRPVQEKFVCLNCGFETHADEQAALNIARSWLFLRSQEYKKYQTNKTTGNTDKRAFVETWQSFYRKKLKEVWKPAV

SEQ ID NO: 284 - protein, 978 aa, synthetic construct
QEIKRINKIRRRLVKDSNTKKAGKTGPMKTLLVRVMTPDLRERLENLRKKPENIPQPISNTSRANLNKLLTDYTEMKKAILHVYWEEFQKDPVGLMSRVAQPASKKIDQNKLKPEMDEKGNLTTAGFACSQCGQPLFVYKLEQVSEKGKAYTNYFGRCNVAEHEKLILLAQLKPEKDSDEAVTYSLGKFGQRALDFYSIHVTKESTHPVKPLAQIAGNRYMSGPVGKALSDACMGTIASFLSKYQDIIIEHQKVVKGNQKRLESLRELAGKENLEYPSVTLPPQPHTKEGVDAYNEVIARVRMWVNLNLWQKLKLSRDDAKPLLRLKGFPSFPLVERQANEVDWWDMVCNVKKLINEKKEDGKVFWQNLAGYKRQEALRPYLSSEEDRKKGKKFARYQLGDLLLHLEKKHGEDWGKVYDEAWERIDKKVEGLSKHIKLEEERRSEDAQSKAALTDWLRAKASFVIEGLKEADKDEFCRCELKLQKWYGDLRGKPFAIEAENSILDISGFSKQYNCAFIWQKDGVKKLNLYLIINYFKGGKLRFKKIKPEAFEANRFYTVINKKSGEIVPMEVNFNFDDPNLIILPLAFGKRQGREFIWNDLLSLETGSLKLANGRVIEKTLYNRRTRQDEPALFVALTFERREVLDSSNIKPMNLIGVDRGENIPAVIALTDPEGCPLSRFKDSLGNPTHILRIGESYKEKQRTIQAKKEVEQRRAGGYSRKYASKAKNLADDMVRNTARDLLYYAVTQDAMLIFENLSRGFGRQGKRTFMAERQYTRMEDWLTAKLAYEGLPSKTYLSKTLAQYTSKTCSNCGFTITSADYDRVLEKLKKTATGWMTTINGKELKVEGQITYYNRYKRQNVVKDLSVELDRLSEESVNNDISSWTKGRSGEALSLLKKRFSHRPVQEKFVCLNCGFETHADEQAALNIARSWLFLRSQEYKKYQTNKTTGNTDKRAFVETWQSFYRKKLKEVWKPAV

SEQ ID NO: 285 - protein, 978 aa, synthetic construct
QEIKRINKIRRRLVKDSNTKKAGKTGPMKTLLVRVMTPDLRERLENLRKKPENIPQPISNTSRANLNKLLTDYTEMKKAILHVYWEEFQKDPVGLMSRVAQPASKKIDQNKLKPEMDEKGNLTTAGFACSQCGQPLFVYKLEQVSEKGKAYTNYFGRCNVAEHEKLILLAQLKPEKDSDEAVTYSLGKFGQRALDFYSIHVTKESTHPVKPLAQIAGNRYASGPVGKALSDACMGTIASFLSKYQDIIIEHQKVVKGNQKRLESLRELAGKENLEYPSVTLPPQPHTKEGVDAYNEVIARVRMWVNLNLWQKLKLSRDDAKPLLRLKGFPSFPLVERQANEVDWWDMVCNVKKLINEKKEDGKVFWQNLAIYKRQEALRPYLSSEEDRKKGKKFARYQLGDLLLHLEKKHGEDWGKVYDEAWERIDKKVEGLSKHIKLEEERRSEDAQSKAALTDWLRAKASFVIEGLKEADKDEFCRCELKLQKWYGDLRGKPFAIEAENSILDISGFSKQYNCAFIWQKDGVKKLNLYLIINYFKGGKLRFKKIKPEAFEANRFYTVINKKSGEIVPMEVNFNFDDPNLIILPLAFGKRQGREFIWNDLLSLETGSLKLANGRVIEKTLYNRRTRQDEPALFVALTFERREVLDSSNIKPMNLIGVDRGENIPAVIALTDPEGCPLSRFKDSLGNPTHILRIGESYKEKQRTIQAKKEVEQRRAGGYSRKYASKAKNLADDMVRNTARDLLYYAVTQDAMLIFENLSRGFGRQGKRTFMAERQYTRMEDWLTAKLAYEGLPSKTYLSKTLAQYTSKTCSNCGFTITSADYDRVLEKLKKTATGWMTTINGKELKVEGQITYYNRYKRQNVVKDLSVELDRLSEESVNNDISSWTKGRSGEALSLLKKRFSHRPVQEKFVCLNCGFETHADEQAALNIARSWLFLRSQEYKKYQTNKTTGNTDKRAFVETWQSFYRKKLKEVWKPAV

SEQ ID NO: 286 - protein, 979 aa, synthetic construct
QEIKRINKIRRRLVKDSNTKKAGKTGPMKTLLVRVMTPDLRERLENLRKKPENIPQPISNTSRANLNKLLTDYTEMKKAILHVYWEEFQKDPVGLMSRVAQPASKKIDQNKLKPEMDEKGNLTTAGFACSQCGQPLFVYKLEQVSEKGKAYTNYFGRCNVAEHEKLILLAQLKPEKDSDEAVTYSLGKFGQRALDFYSIHVTKESTHPVKPLAQIAGNRYASGPVGKALSDACMGTIASFLSKYQDIIIEHQKVVKGNQKRLESLRELAGKENLEYPSVTLPPQPHTKEGVDAYNEVIARVRMWVNLNLWQKLKLSRDDAKPLLRLKGFPSFPLVERQANEVDWWDMVCNVKKLINEKKEDGKVFWQNLAGYKRQEALRPYLSSEEDVRKKGKKFARYQLGDLLLHLEKKHGEDWGKVYDEAWERIDKKVEGLSKHIKLEEERRSEDAQSKAALTDWLRAKASFVIEGLKEADKDEFCRCELKLQKWYGDLRGKPFAIEAENSILDISGFSKQYNCAFIWQKDGVKKLNLYLIINYFKGGKLRFKKIKPEAFEANRFYTVINKKSGEIVPMEVNFNFDDPNLIILPLAFGKRQGREFIWNDLLSLETGSLKLANGRVIEKTLYNRRTRQDEPALFVALTFERREVLDSSNIKPMNLIGVDRGENIPAVIALTDPEGCPLSRFKDSLGNPTHILRIGESYKEKQRTIQAKKEVEQRRAGGYSRKYASKAKNLADDMVRNTARDLLYYAVTQDAMLIFENLSRGFGRQGKRTFMAERQYTRMEDWLTAKLAYEGLPSKTYLSKTLAQYTSKTCSNCGFTITSADYDRVLEKLKKTATGWMTTINGKELKVEGQITYYNRYKRQNVVKDLSVELDRLSEESVNNDISSWTKGRSGEALSLLKKRFSHRPVQEKFVCLNCGFETHADEQAALNIARSWLFLRSQEYKKYQTNKTTGNTDKRAFVETWQSFYRKKLKEVWKPAV

SEQ ID NO: 287 - protein, 978 aa, synthetic construct
QEIKRINKIRRRLVKDSNTKKAGKTGPMKTLLVRVMTPDLRERLENLRKKPENIPQPISNTSRANLNKLLTDYTEMKKAILHVYWEEFQKDPVGLMSRVAQPASKKIDQNKLKPEMDEKGNLTTAGFACSQCGQPLFVYKLEQVSEKGKAYTNYFGRCNVAEHEKLILLAQLKPEKDSDEAVTYSLGKFGQRALDFYSIHVTKESTHPVKPLAQIAGNRYASGPVGKALSDACMGTIASFLSKYQDIIIEHQKVVKGNQKRLESLRELAGKENLEYPSVTLPPQPHTKEGVDAYNEVIARVRMWVNLNLWQKLKLSRDDAKPLLRLKGFPSFPLVERQANEVDWWDMVCNVKKLINEKKEDGKVFWQNLAGYKRQEALRPYLSSEEDREKGKKFARYQLGDLLLHLEKKHGEDWGKVYDEAWERIDKKVEGLSKHIKLEEERRSEDAQSKAALTDWLRAKASFVIEGLKEADKDEFCRCELKLQKWYGDLRGKPFAIEAENSILDISGFSKQYNCAFIWQKDGVKKLNLYLIINYFKGGKLRFKKIKPEAFEANRFYTVINKKSGEIVPMEVNFNFDDPNLIILPLAFGKRQGREFIWNDLLSLETGSLKLANGRVIEKTLYNRRTRQDEPALFVALTFERREVLDSSNIKPMNLIGVDRGENIPAVIALTDPEGCPLSRFKDSLGNPTHILRIGESYKEKQRTIQAKKEVEQRRAGGYSRKYASKAKNLADDMVRNTARDLLYYAVTQDAMLIFENLSRGFGRQGKRTFMAERQYTRMEDWLTAKLAYEGLPSKTYLSKTLAQYTSKTCSNCGFTITSADYDRVLEKLKKTATGWMTTINGKELKVEGQITYYNRYKRQNVVKDLSVELDRLSEESVNNDISSWTKGRSGEALSLLKKRFSHRPVQEKFVCLNCGFETHADEQAALNIARSWLFLRSQEYKKYQTNKTTGNTDKRAFVETWQSFYRKKLKEVWKPAV

SEQ ID NO: 288 - protein, 979 aa, synthetic construct
QEIKRINKIRRRLVKDSNTKKAGKTGPMKTLLVRVMTPDLRERLENLRKKPENIPQPISNTSRANLNKLLTDYTEMKKAILHVYWEEFQKDPVGLMSRVAQPASKKIDQNKLKPEMDEKGNLTTAGFACSQCGQPLFVYKLEQVSEKGKAYTNYFGRCNVAEHEKLILLAQLKPEKDSDEAVTYSLGKFGQRALDFYSIHVTKESTHPVKPLAQIAGNRYASGPVGKALSDACMGTIASFLSKYQDIIIEHQKVVKGNQKRLESLRELAGKENLEYPSVTLPPQPHTKEGVDAYNEVIARVRMWVNLNLWQKLKLSRDDAKPLLRLKGFPSFPLVERQANEVDWWDMVCNVKKLINEKKEDGKVFWQNLAGYKRQEALRPYLSSEEDRKKGKKFARYQLGDLLLHLEKKHGEDWGKVYDEAWERIDKKVEGLSKHIKLEEERRSEDAQSKAALTDWLRAKASFVIEGLKEADKDEMFCRCELKLQKWYGDLRGKPFAIEAENSILDISGFSKQYNCAFIWQKDGVKKLNLYLIINYFKGGKLRFKKIKPEAFEANRFYTVINKKSGEIVPMEVNFNFDDPNLIILPLAFGKRQGREFIWNDLLSLETGSLKLANGRVIEKTLYNRRTRQDEPALFVALTFERREVLDSSNIKPMNLIGVDRGENIPAVIALTDPEGCPLSRFKDSLGNPTHILRIGESYKEKQRTIQAKKEVEQRRAGGYSRKYASKAKNLADDMVRNTARDLLYYAVTQDAMLIFENLSRGFGRQGKRTFMAERQYTRMEDWLTAKLAYEGLPSKTYLSKTLAQYTSKTCSNCGFTITSADYDRVLEKLKKTATGWMTTINGKELKVEGQITYYNRYKRQNVVKDLSVELDRLSEESVNNDISSWTKGRSGEALSLLKKRFSHRPVQEKFVCLNCGFETHADEQAALNIARSWLFLRSQEYKKYQTNKTTGNTDKRAFVETWQSFYRKKLKEVWKPAV

SEQ ID NO: 289 - protein, 978 aa, synthetic construct
QEIKRINKIRRRLVKDSNTKKAGKTGPMKTLLVRVMTPDLRERLENLRKKPENIPQPISNTSRANLNKLLTDYTEMKKAILHVYWEEFQKDPVGLMSRVAQPASKKIDQNKLKPEMDEKGNLTTAGFACSQCGQPLFVYKLEQVSEKGKAYTNYFGRCNVAEHEKLILLAQLKPEKDSDEAVTYSLGKFGQRALDFYSIHVTKESTHPVKPLAQIAGNRYASGPVGKALSDACMGTIASFLSKYQDIIIEHQKVVKGNQKRLESLRELAGKENLEYPSVTLPPQPHTKEGVDAYNEVIARVRMWVNLNLWQKLKLSRDDAKPLLRLKGFPSFPLVERQANEVDWWDMVCNVKKLINEKKEDGKVFWQNLAGYKRQEALRPYLSSEEDRKKGKKFARYQLGDLLLHLEKKHGEDWGKVYDEAWERIDKKVEGLSKHIKLEEERRSEDAQSKAALTDWLRAKASFVIEGLKEADKDEFCRCELKLQKWYGDLRGKPFAIEAENSILDISGFSKQYNCAFIWQKDGVKKQNLYLIINYFKGGKLRFKKIKPEAFEANRFYTVINKKSGEIVPMEVNFNFDDPNLIILPLAFGKRQGREFIWNDLLSLETGSLKLANGRVIEKTLYNRRTRQDEPALFVALTFERREVLDSSNIKPMNLIGVDRGENIPAVIALTDPEGCPLSRFKDSLGNPTHILRIGESYKEKQRTIQAKKEVEQRRAGGYSRKYASKAKNLADDMVRNTARDLLYYAVTQDAMLIFENLSRGFGRQGKRTFMAERQYTRMEDWLTAKLAYEGLPSKTYLSKTLAQYTSKTCSNCGFTITSADYDRVLEKLKKTATGWMTTINGKELKVEGQITYYNRYKRQNVVKDLSVELDRLSEESVNNDISSWTKGRSGEALSLLKKRFSHRPVQEKFVCLNCGFETHADEQAALNIARSWLFLRSQEYKKYQTNKTTGNTDKRAFVETWQSFYRKKLKEVWKPAV

SEQ ID NO: 290 - protein, 978 aa, synthetic construct
QEIKRINKIRRRLVKDSNTKKAGKTGPMKTLLVRVMTPDLRERLENLRKKPENIPQPISNTSRANLNKLLTDYTEMKKAILHVYWEEFQKDPVGLMSRVAQPASKKIDQNKLKPEMDEKGNLTTAGFACSQCGQPLFVYKLEQVSEKGKAYTNYFGRCNVAEHEKLILLAQLKPEKDSDEAVTYSLGKFGQRALDFYSIHVTKESTHPVKPLAQIAGNRYASGPVGKALSDACMGTIASFLSKYQDIIIEHQKVVKGNQKRLESLRELAGKENLEYPSVTLPPQPHTKEGVDAYNEVIARVRMWVNLNLWQKLKLSRDDAKPLLRLKGFPSFPLVERQANEVDWWDMVCNVKKLINEKKEDGKVFWQNLAGYKRQEALRPYLSSEEDRKKGKKFARYQLGDLLLHLEKKHGEDWGKVYDEAWERIDKKVEGLSKHIKLEEERRSEDAQSKAALTDWLRAKASFVIEGLKEADKDEFCRCELKLQKWYGDLRGKPFAIEAENSILDISGFSKQYNCAFIWQKDGVKKLNLYLIINYFKGGKLRFKKIKPEAFEANRFYTVINKKSGEIVIMEVNFNFDDPNLIILPLAFGKRQGREFIWNDLLSLETGSLKLANGRVIEKTLYNRRTRQDEPALFVALTFERREVLDSSNIKPMNLIGVDRGENIPAVIALTDPEGCPLSRFKDSLGNPTHILRIGESYKEKQRTIQAKKEVEQRRAGGYSRKYASKAKNLADDMVRNTARDLLYYAVTQDAMLIFENLSRGFGRQGKRTFMAERQYTRMEDWLTAKLAYEGLPSKTYLSKTLAQYTSKTCSNCGFTITSADYDRVLEKLKKTATGWMTTINGKELKVEGQITYYNRYKRQNVVKDLSVELDRLSEESVNNDISSWTKGRSGEALSLLKKRFSHRPVQEKFVCLNCGFETHADEQAALNIARSWLFLRSQEYKKYQTNKTTGNTDKRAFVETWQSFYRKKLKEVWKPAV

SEQ ID NO: 291 - protein, 978 aa, synthetic construct
QEIKRINKIRRRLVKDSNTKKAGKTGPMKTLLVRVMTPDLRERLENLRKKPENIPQPISNTSRANLNKLLTDYTEMKKAILHVYWEEFQKDPVGLMSRVAQPASKKIDQNKLKPEMDEKGNLTTAGFACSQCGQPLFVYKLEQVSEKGKAYTNYFGRCNVAEHEKLILLAQLKPEKDSDEAVTYSLGKFGQRALDFYSIHVTKESTHPVKPLAQIAGNRYASGPVGKALSDACMGTIASFLSKYQDIIIEHQKVVKGNQKRLESLRELAGKENLEYPSVTLPPQPHTKEGVDAYNEVIARVRMWVNLNLWQKLKLSRDDAKPLLRLKGFPSFPLVERQANEVDWWDMVCNVKKLINEKKEDGKVFWQNLAGYKRQEALRPYLSSEEDRKKGKKFARYQLGDLLLHLEKKHGEDWGKVYDEAWERIDKKVEGLSKHIKLEEERRSEDAQSKAALTDWLRAKASFVIEGLKEADKDEFCRCELKLQKWYGDLRGKPFAIEAENSILDISGFSKQYNCAFIWQKDGVKKLNLYLIINYFKGGKLRFKKIKPEAFEANRFYTVINKKSGEIVPMEVNFNFDDPNLIILPLAFGKRQGREFIWNDLLSLETGSLKLANGRVIEKTLYNRRTRQDEPALFVALTFERREVNDSSNIKPMNLIGVDRGENIPAVIALTDPEGCPLSRFKDSLGNPTHILRIGESYKEKQRTIQAKKEVEQRRAGGYSRKYASKAKNLADDMVRNTARDLLYYAVTQDAMLIFENLSRGFGRQGKRTFMAERQYTRMEDWLTAKLAYEGLPSKTYLSKTLAQYTSKTCSNCGFTITSADYDRVLEKLKKTATGWMTTINGKELKVEGQITYYNRYKRQNVVKDLSVELDRLSEESVNNDISSWTKGRSGEALSLLKKRFSHRPVQEKFVCLNCGFETHADEQAALNIARSWLFLRSQEYKKYQTNKTTGNTDKRAFVETWQSFYRKKLKEVWKPAV

SEQ ID NO: 292 - protein, 979 aa, synthetic construct
QEIKRINKIRRRLVKDSNTKKAGKTGPMKTLLVRVMTPDLRERLENLRKKPENIPQPISNTSRANLNKLLTDYTEMKKAILHVYWEEFQKDPVGLMSRVAQPASKKIDQNKLKPEMDEKGNLTTAGFACSQCGQPLFVYKLEQVSEKGKAYTNYFGRCNVAEHEKLILLAQLKPEKDSDEAVTYSLGKFGQRALDFYSIHVTKESTHPVKPLAQIAGNRYASGPVGKALSDACMGTIASFLSKYQDIIIEHQKVVKGNQKRLESLRELAGKENLEYPSVTLPPQPHTKEGVDAYNEVIARVRMWVNLNLWQKLKLSRDDAKPLLRLKGFPSFPLVERQANEVDWWDMVCNVKKLINEKKEDGKVFWQNLAGYKRQEALRPYLSSEEDRKKGKKFARYQLGDLLLHLEKKHGEDWGKVYDEAWERIDKKVEGLSKHIKLEEERRSEDAQSKAALTDWLRAKASFVIEGLKEADKDEFCRCELKLQKWYGDLRGKPFAIEAENSILDISGFSKQYNCAFIWQKDGVKKLNLYLIINYFKGGKLRFKKIKPEAFEANRFYTVINKKSGEIVPMEVNFNFDDPNLIILPLAFGKRQGREFIWNDLLSLETGSLKLANGRVIEKTLYNRRTRQDEPALFVALTFERREVLDSSNIKPMNLIGVDRGENIPAVIALTDPEGCPLSRFKDSLGNPTHILRIGESYKEKQRTIQAKKEVEQRRAGGYSRKYASKAKNLADDMVRNTARDLLYYAVTQDAMLIFENLSRGFGRQGKRTFMAERQYTRMEDWLTAKLAYEGLPSGKTYLSKTLAQYTSKTCSNCGFTITSADYDRVLEKLKKTATGWMTTINGKELKVEGQITYYNRYKRQNVVKDLSVELDRLSEESVNNDISSWTKGRSGEALSLLKKRFSHRPVQEKFVCLNCGFETHADEQAALNIARSWLFLRSQEYKKYQTNKTTGNTDKRAFVETWQSFYRKKLKEVWKPAV

SEQ ID NO: 293 - protein, 978 aa, synthetic construct
QEIKRINKIRRRLVKDSNTKKAGKTGPMKTLLVRVMTPDLRERLENLRKKPENIPQPISNTSRANLNKLLTDYTEMKKAILHVYWEEFQKDPVGLMSRVAQPASKKIDQNKLKPEMDEKGNLTTAGFACSQCGQPLFVYKLEQVSEKGKAYTNYFGRCNVAEHEKLILLAQLKPEKDSDEAVTYSLGKFGQRALDFYSIHVTKESTHPVKPLAQIAGNRYASGPVGKALSDACMGTIASFLSKYQDIIIEHQKVVKGNQKRLESLRELAGKENLEYPSVTLPPQPHTKEGVDAYNEVIARVRMWVNLNLWQKLKLSRDDAKPLLRLKGFPSFPLVERQANEVDWWDMVCNVKKLINEKKEDGKVFWQNLAGYKRQEALRPYLSSEEDRKKGKKFARYQLGDLLLHLEKKHGEDWGKVYDEAWERIDKKVEGLSKHIKLEEERRSEDAQSKAALTDWLRAKASFVIEGLKEADKDEFCRCELKLQKWYGDLRGKPFAIEAENSILDISGFSKQYNCAFIWQKDGVKKLNLYLIINYFKGGKLRFKKIKPEAFEANRFYTVINKKSGEIVPMEVNFNFDDPNLIILPLAFGKRQGREFIWNDLLSLETGSLKLANGRVIEKTLYNRRTRQDEPALFVALTFERREVLDSSNIKPMNLIGVDRGENIPAVIALTDPEGCPLSRFKDSLGNPTHILRIGESYKEKQRTIQAKKEVEQRRAGGYSRKYASKAKNLADDMVRNTARDLLYYAVTQDAMLIFENLSRGFGRQGKRTFMAERQYTRMEDWLTAKLAYEGLPSKTYLSKTLAQYTSKTCSNCGFTITSADYDRMLEKLKKTATGWMTTINGKELKVEGQITYYNRYKRQNVVKDLSVELDRLSEESVNNDISSWTKGRSGEALSLLKKRFSHRPVQEKFVCLNCGFETHADEQAALNIARSWLFLRSQEYKKYQTNKTTGNTDKRAFVETWQSFYRKKLKEVWKPAV

SEQ ID NO: 294 - protein, 978 aa, synthetic construct
QEIKRINKIRRRLVKDSNTKKAGKTGPMKTLLVRVMTPDLRERLENLRKKPENIPQPISNTSRANLNKLLTDYTEMKKAILHVYWEEFQKDPVGLMSRVAQPASKKIDQNKLKPEMDEKGNLTTAGFACSQCGQPLFVYKLEQVSEKGKAYTNYFGRCNVAEHEKLILLAQLKPEKDSDEAVTYSLGKFGQRALDFYSIHVTKESTHPVKPLAQIAGNRYASGPVGKALSDACMGTIASFLSKYQDIIIEHQKVVKGNQKRLESLRELAGKENLEYPSVTLPPQPHTKEGVDAYNEVIARVRMWVNLNLWQKLKLSRDDAKPLLRLKGFPSFPLVERQANEVDWWDMVCNVKKLINEKKEDGKVFWQNLAGYKRQEALRPYLSSEEDRKKGKKFARYQLGDLLLHLEKKHGEDWGKVYDEAWERIDKKVEGLSKHIKLEEERRSEDAQSKAALTDWLRAKASFVIEGLKEADKDEFCRCELKLQKWYGDLRGKPFAIEAENSILDISGFSKQYNCAFIWQKDGVKKLNLYLIINYFKGGKLRFKKIKPEAFEANRFYTVINKKSGEIVPMEVNFNFDDPNLIILPLAFGKRQGREFIWNDLLSLETGSLKLANGRVIEKTLYNRRTRQDEPALFVALTFERREVLDSSNIKPMNLIGVDRGENIPAVIALTDPEGCPLSRFKDSLGNPTHILRIGESYKEKQRTIQAKKEVEQRRAGGYSRKYASKAKNLADDMVRNTARDLLYYAVTQDAMLIFENLSRGFGRQGKRTFMAERQYTRMEDWLTAKLAYEGLPSKTYLSKTLAQYTSKTCSNCGFTITSADYDRVLEKLKKTATGWMTTINGKELKVEGQITYYNRYKRQNVVKDLSVELDRLSEESVNNDISSWTKGRQGEALSLLKKRFSHRPVQEKFVCLNCGFETHADEQAALNIARSWLFLRSQEYKKYQTNKTTGNTDKRAFVETWQSFYRKKLKEVWKPAV

SEQ ID NO: 295 - protein, 978 aa, synthetic construct
QEIKRINKIRRRLVKDSNTKKAGKTGPMKTLLVRVMTPDLRERLENLRKKPENIPQPISNTSRANLNKLLTDYTEMKKAILHVYWEEFQKDPVGLMSRVAQPASKKIDQNKLKPEMDEKGNLTTAGFACSQCGQPLFVYKLEQVSEKGKAYTNYFGRCNVAEHEKLILLAQLKPEKDSDEAVTYSLGKFGQRALDFYSIHVTKESTHPVKPLAQIAGNRYASGPVGKALSDACMGTIASFLSKYQDIIIEHQKVVKGNQKRLESLRELAGKENLEYPSVTLPPQPHTKEGVDAYNEVIARVRMWVNLNLWQKLKLSRDDAKPLLRLKGFPSFPLVERQANEVDWWDMVCNVKKLINEKKEDGKVFWQNLAGYKRQEALRPYLSSEEDRKKGKKFARYQLGDLLLHLEKKHGEDWGKVYDEAWERIDKKVEGLSKHIKLEEERRSEDAQSKAALTDWLRAKASFVIEGLKEADKDEFCRCELKLQKWYGDLRGKPFAIEAENSILDISGFSKQYNCAFIWQKDGVKKLNLYLIINYFKGGKLRFKKIKPEAFEANRFYTVINKKSGEIVPMEVNFNFDDPNLIILPLAFGKRQGREFIWNDLLSLETGSLKLANGRVIEKTLYNRRTRQDEPALFVALTFERREVLDSSNIKPMNLIGVDRGENIPAVIALTDPEGCPLSRFKDSLGNPTHILRIGESYKEKQRTIQAKKEVEQRRAGGYSRKYASKAKNLADDMVRNTARDLLYYAVTQDAMLIFENLSRGFGRQGKRTFMAERQYTRMEDWLTAKLAYEGLPSKTYLSKTLAQYTSKTCSNCGFTITSADYDRVLEKLKKTATGWMTTINGKELKVEGQITYYNRYKRQNVVKDLSVELDRLSEESVNNDISSWTKGRSGEALSLLKKRFSHRPVQEKFVCLNCEFETHADEQAALNIARSWLFLRSQEYKKYQTNKTTGNTDKRAFVETWQSFYRKKLKEVWKPAV

SEQ ID NO: 296 - protein, 979 aa, synthetic construct
QEIKRINKIRRRLVKDSNTKKAGKTGPMKTLLVRVMTPDLRERLENLRKKPENIPQPISNTSRANLNKLLTDYTEMKKAILHVYWEEFQKDPVGLMSRVAQPASKKIDQNKLKPEMDEKGNLTTAGFACSQCGQPLFVYKLEQVSEKGKAYTNYFGRCNVAEHEKLILLAQLKPEKDSDEAVTYSLGKFGQRALDFYSIHVTKESTHPVKPLAQIAGNRYASGPVGKALSDACMGTIASFLSKYQDIIIEHQKVVKGNQKRLESLRELAGKENLEYPSVTLPPQPHTKEGVDAYNEVIARVRMWVNLNLWQKLKLSRDDAKPLLRLKGFPSFPLVERQANEVDWWDMVCNVKKLINEKKEDGKVFWQNLAGYKRQEALRPYLSSEEDRKKGKKFARYQLGDLLLHLEKKHGEDWGKVYDEAWERIDKKVEGLSKHIKLEEERRSEDAQSKAALTDWLRAKASFVIEGLKEADKDEFCRCELKLQKWYGDLRGKPFAIEAENSILDISGFSKQYNCAFIWQKDGVKKLNLYLIINYFKGGKLRFKKIKPEAFEANRFYTVINKKSGEIVPMEVNFNFDDPNLIILPLAFGKRQGREFIWNDLLSLETGSLKLANGRVIEKTLYNRRTRQDEPALFVALTFERREVLDSSNIKPMNLIGVDRGENIPAVIALTDPEGCPLSRFKDSLGNPTHILRIGESYKEKQRTIQAKKEVEQRRAGGYSRKYASKAKNLADDMVRNTARDLLYYAVTQDAMLIFENLSRGFGRQGKRTFMAERQYTRMEDWLTAKLAYEGLPSKTYLSKTLAQYTSKTCSNCGFTITSADYDRVLEKLKKTATGWMTTINGKELKVEGQITYYNRYKRQNVVKDLSVELDRLSEESVNNDISSWTKGRSGEALSLLKKRFSHRPVQEKFVCLNCGFETHADEQAALNIARSWLFLRSQEYKKYQTNKTSTGNTDKRAFVETWQSFYRKKLKEVWKPAV

SEQ ID NO: 297 - protein, 979 aa, synthetic construct
QEIKRINKIRRRLVKDSNTKKAGKTGPMKTLLVRVMTPDLRERLENLRKKPENIPQPISNTSRANLNKLLTDYTEMKKAILHVYWEEFQKDPVGLMSRVAQPASKKIDQNKLKPEMDEKGNLTTAGFACSQCGQPLFVYKLEQVSEKGKAYTNYFGRCNVAEHEKLILLAQLKPEKDSDEAVTYSLGKFGQRALDFYSIHVTKESTHPVKPLAQIAGNRYASGPVGKALSDACMGTIASFLSKYQDIIIEHQKVVKGNQKRLESLRELAGKENLEYPSVTLPPQPHTKEGVDAYNEVIARVRMWVNLNLWQKLKLSRDDAKPLLRLKGFPSFPLVERQANEVDWWDMVCNVKKLINEKKEDGKVFWQNLAGYKRQEALRPYLSSEEDRKKGKKFARYQLGDLLLHLEKKHGEDWGKVYDEAWERIDKKVEGLSKHIKLEEERRSEDAQSKAALTDWLRAKASFVIEGLKEADKDEFCRCELKLQKWYGDLRGKPFAIEAENSILDISGFSKQYNCAFIWQKDGVKKLNLYLIINYFKGGKLRFKKIKPEAFEANRFYTVINKKSGEIVPMEVNFNFDDPNLIILPLAFGKRQGREFIWNDLLSLETGSLKLANGRVIEKTLYNRRTRQDEPALFVALTFERREVLDSSNIKPMNLIGVDRGENIPAVIALTDPEGCPLSRFKDSLGNPTHILRIGESYKEKQRTIQAKKEVEQRRAGGYSRKYASKAKNLADDMVRNTARDLLYYAVTQDAMLIFENLSRGFGRQGKRTFMAERQYTRMEDWLTAKLAYEGLPSKTYLSKTLAQYTSKTCSNCGFTITSADYDRVLEKLKKTATGWMTTINGKELKVEGQITYYNRYKRQNVVKDLSVELDRLSEESVNNDISSWTKGRSGEALSLLKKRFSHRPVQEKFVCLNCGFETHADEQAALNIARSWLFLRSQEYKKYQTNKTTGKNTDKRAFVETWQSFYRKKLKEVWKPAV

SEQ ID NO: 298 - protein, 979 aa, synthetic construct
QEIKRINKIRRRLVKDSNTKKAGKTRGPMKTLLVRVMTPDLRERLENLRKKPENIPQPISNTSRANLNKLLTDYTEMKKAILHVYWEEFQKDPVGLMSRVAQPASKKIDQNKLKPEMDEKGNLTTAGFACSQCGQPLFVYKLEQVSEKGKAYTNYFGRCNVAEHEKLIKLAQLKPEKDSDEAVTYSLGKFGQRALDFYSIHVTKESTHPVKPLAQIAGNRYASGPVGKALSDACMGTIASFLSKYQDIIIEHQKVVKGNQKRLESLRELAGKENLEYPSVTLPPQPHTKEGVDAYNEVIARVRMWVNLNLWQKLKLSRDDAKPLLRLKGFPSFPLVERQANEVDWWDMVCNVKKLINEKKEDGKVFWQNLAGYKRQEALRPYLSSEEDRKKGKKFARYQLGDLLLHLEKKHGEDWGKVYDEAWERIDKKVEGLSKHIKLEEERRSEDAQSKAALTDWLRAKASFVIEGLKEADKDEFCRCELKLQKWYGDLRGKPFAIEAENSILDISGFSKQYNCAFIWQKDGVKKLNLYLIINYFKGGKLRFKKIKPEAFEANRFYTVINKKSGEIVPMEVNFNFDDPNLIILPLAFGKRQGREFIWNDLLSLETGSLKLANGRVIEKTLYNRRTRQDEPALFVALTFERREVLDSSNIKPMNLIGVDRGENIPAVIALTDPEGCPLSRFKDSLGNPTHILRIGESYKEKQRTIQAKKEVEQRRAGGYSRKYASKAKNLADDMVRNTARDLLYYAVTQDAMLIFENLSRGFGRQGKRTFMAERQYTRMEDWLTAKLAYEGLPSKTYLSKTLAQYTSKTCSNCGFTITSADYDRVLEKLKKTATGWMTTINGKELKVEGQITYYNRYKRQNVVKDLSVELDRLSEESVNNDISSWTKGRSGEALSLLKKRFSHRPVQEKFVCLNCGFETHADEQAALNIARSWLFLRSQEYKKYQTNKTTGNTDKRAFVETWQSFYRKKLKEVWKPAV

SEQ ID NO: 299 - protein, 979 aa, synthetic construct
QEIKRINKIRRRLVKDSNTKKAGKTGPMKTLLVRVMTPDLRERLENLRKKPENIPQPISNTSRANLNKLLTDYTEMKKAILHVYWEEFQKDPVGLMSRVAGQPASKKIDQNKLKPEMDEKGNLTTAGFACSQCGQPLFVYKLEQVSEKGKAYTNYFGRCNVAEHEKLILLAQLKPEKDSDEAVTYSLGKFGQRALDFYSIHVTKESTHPVKPLAQIAGNRYASGPVGKALSDACMGTIASFLSKYQDIIIEHQKVVKGNQKRLESLRELAGKENLEYPSVTLPPQPHTKEGVDAYNEVIARVRMWVNLNLWQKLKLSRDDAKPLLRLKGFPSFPLVERQANEVDWWDMVCNVKKLINEKKEDGKVFWQNLAGYKRQEALRPYLSSEEDRKKGKKFARYQLGDLLLHLEKKHGEDWGKVYDEAWERIDKKVEGLSKHIKLEEERRSEDAQSKAALTDWLRAKASFVIEGLKEADKDEFCRCELKLQKWYGDLRGKPFAIEAENSILDISGFSKQYNCAFIWQKDGVKKLNLYLIINYFKGGKLRFKKIKPEAFEANRFYTVINKKSGEIVPMEVNFNFDDPNLIILPLAFGKRQGREFIWNDLLSLETGSLKLANGRVIEKTLYNRRTRQDEPALFVALTFERREVLDSSNIKPMNLIGVDRGENIPAVIALTDPEGCPLSRFKDSLGNPTHILRIGESYKEKQRTIQAKKEVEQRRAGGYSRKYASKAKNLADDMVRNTARDLLYYAVTQDAMLIFENLSRGFGRQGKRTFMAERQYTRMEDWLTAKLAYEGLPSKTYLSKTLAQYTSKTCSNCGFTITSADYDRVLEKLKKTATGWMTTINGKELKVEGQITYYNRYKRQNVVKDLSVELDRLSEESVNNDISSWTKGRSGEALSLLKKRFSHRPVQEKFVCLNCGFETHADEQAALNIARSWLFLRSQEYKKYQTNKTTGNTDKRAFVETWQSFYRKKLKEVWKPAV

SEQ ID NO: 300 - protein, 979 aa, synthetic construct
QEIKRINKIRRRLVKDSNTKKAGKTGPMKTLLVRVMTPDLRERLENLRKKPENIPQPISNTSRANLNKLLTDYTEMKKAILHVYWEEFQKDPVGLMSRVAQPIASKKIDQNKLKPEMDEKGNLTTAGFACSQCGQPLFVYKLEQVSEKGKAYTNYFGRCNVAEHEKLILLAQLKPEKDSDEAVTYSLGKFGQRALDFYSIHVTKESTHPVKPLAQIAGNRYASGPVGKALSDACMGTIASFLSKYQDIIIEHQKVVKGNQKRLESLRELAGKENLEYPSVTLPPQPHTKEGVDAYNEVIARVRMWVNLNLWQKLKLSRDDAKPLLRLKGFPSFPLVERQANEVDWWDMVCNVKKLINEKKEDGKVFWQNLAGYKRQEALRPYLSSEEDRKKGKKFARYQLGDLLLHLEKKHGEDWGKVYDEAWERIDKKVEGLSKHIKLEEERRSEDAQSKAALTDWLRAKASFVIEGLKEADKDEFCRCELKLQKWYGDLRGKPFAIEAENSILDISGFSKQYNCAFIWQKDGVKKLNLYLIINYFKGGKLRFKKIKPEAFEANRFYTVINKKSGEIVPMEVNFNFDDPNLIILPLAFGKRQGREFIWNDLLSLETGSLKLANGRVIEKTLYNRRTRQDEPALFVALTFERREVLDSSNIKPMNLIGVDRGENIPAVIALTDPEGCPLSRFKDSLGNPTHILRIGESYKEKQRTIQAKKEVEQRRAGGYSRKYASKAKNLADDMVRNTARDLLYYAVTQDAMLIFENLSRGFGRQGKRTFMAERQYTRMEDWLTAKLAYEGLPSKTYLSKTLAQYTSKTCSNCGFTITSADYDRVLEKLKKTATGWMTTINGKELKVEGQITYYNRYKRQNVVKDLSVELDRLSEESVNNDISSWTKGRSGEALSLLKKRFSHRPVQEKFVCLNCGFETHADEQAALNIARSWLFLRSQEYKKYQTNKTTGNTDKRAFVETWQSFYRKKLKEVWKPAV

SEQ ID NO: 301 - protein, 979 aa, synthetic construct
QEIKRINKIRRRLVKDSNTKKAGKTGPMKTLLVRVMTPDLRERLENLRKKPENIPQPISNTSRANLNKLLTDYTEMKKAILHVYWEEFQKDPVGLMSRVAQPALSKKIDQNKLKPEMDEKGNLTTAGFACSQCGQPLFVYKLEQVSEKGKAYTNYFGRCNVAEHEKLILLAQLKPEKDSDEAVTYSLGKFGQRALDFYSIHVTKESTHPVKPLAQIAGNRYASGPVGKALSDACMGTIASFLSKYQDIIIEHQKVVKGNQKRLESLRELAGKENLEYPSVTLPPQPHTKEGVDAYNEVIARVRMWVNLNLWQKLKLSRDDAKPLLRLKGFPSFPLVERQANEVDWWDMVCNVKKLINEKKEDGKVFWQNLAGYKRQEALRPYLSSEEDRKKGKKFARYQLGDLLLHLEKKHGEDWGKVYDEAWERIDKKVEGLSKHIKLEEERRSEDAQSKAALTDWLRAKASFVIEGLKEADKDEFCRCELKLQKWYGDLRGKPFAIEAENSILDISGFSKQYNCAFIWQKDGVKKLNLYLIINYFKGGKLRFKKIKPEAFEANRFYTVINKKSGEIVPMEVNFNFDDPNLIILPLAFGKRQGREFIWNDLLSLETGSLKLANGRVIEKTLYNRRTRQDEPALFVALTFERREVLDSSNIKPMNLIGVDRGENIPAVIALTDPEGCPLSRFKDSLGNPTHILRIGESYKEKQRTIQAKKEVEQRRAGGYSRKYASKAKNLADDMVRNTARDLLYYAVTQDAMLIFENLSRGFGRQGKRTFMAERQYTRMEDWLTAKLAYEGLPSKTYLSKTLAQYTSKTCSNCGFTITSADYDRVLEKLKKTATGWMTTINGKELKVEGQITYYNRYKRQNVVKDLSVELDRLSEESVNNDISSWTKGRSGEALSLLKKRFSHRPVQEKFVCLNCGFETHADEQAALNIARSWLFLRSQEYKKYQTNKTTGNTDKRAFVETWQSFYRKKLKEVWKPAV

SEQ ID NO: 302 - protein, 979 aa, synthetic construct
QEIKRINKIRRRLVKDSNTKKAGKTGPMKTLLVRVMTPDLRERLENLRKKPENIPQPISNTSRANLNKLLTDYTEMKKAILHVYWEEFQKDPVGLMSRVAQPASKKIDQNKLKPEMDEKGNLTTAGFACSQCGQPLFVYKLEQVSEKGKAYTNYFGRCNVAEHEKLILLAQLKPEKDSDEAVTYSLGKFGQRALDFYSIHVTKESTHPVKPLAQIAGNRYASGPVGKALSDACMGTIASFLSKYQDIIIEHQKVVKGNQKRLESLRELAGKENLEYPSVTLPPQPHTKEGVDAYNEVIARVRMWVNLNLWQKLKLSRDDAKPLLRLKGFPSFPDLVERQANEVDWWDMVCNVKKLINEKKEDGKVFWQNLAGYKRQEALRPYLSSEEDRKKGKKFARYQLGDLLLHLEKKHGEDWGKVYDEAWERIDKKVEGLSKHIKLEEERRSEDAQSKAALTDWLRAKASFVIEGLKEADKDEFCRCELKLQKWYGDLRGKPFAIEAENSILDISGFSKQYNCAFIWQKDGVKKLNLYLIINYFKGGKLRFKKIKPEAFEANRFYTVINKKSGEIVPMEVNFNFDDPNLIILPLAFGKRQGREFIWNDLLSLETGSLKLANGRVIEKTLYNRRTRQDEPALFVALTFERREVLDSSNIKPMNLIGVDRGENIPAVIALTDPEGCPLSRFKDSLGNPTHILRIGESYKEKQRTIQAKKEVEQRRAGGYSRKYASKAKNLADDMVRNTARDLLYYAVTQDAMLIFENLSRGFGRQGKRTFMAERQYTRMEDWLTAKLAYEGLPSKTYLSKTLAQYTSKTCSNCGFTITSADYDRVLEKLKKTATGWMTTINGKELKVEGQITYYNRYKRQNVVKDLSVELDRLSEESVNNDISSWTKGRSGEALSLLKKRFSHRPVQEKFVCLNCGFETHADEQAALNIARSWLFLRSQEYKKYQTNKTTGNTDKRAFVETWQSFYRKKLKEVWKPAV

SEQ ID NO: 303 - protein, 979 aa, synthetic construct
QEIKRINKIRRRLVKDSNTKKAGKTGPMKTLLVRVMTPDLRERLENLRKKPENIPQPISNTSRANLNKLLTDYTEMKKAILHVYWEEFQKDPVGLMSRVAQPASKKIDQNKLKPEMDEKGNLTTAGFACSQCGQPLFVYKLEQVSEKGKAYTNYFGRCNVAEHEKLILLAQLKPEKDSDEAVTYSLGKFGQRALDFYSIHVTKESTHPVKPLAQIAGNRYASGPVGKALSDACMGTIASFLSKYQDIIIEHQKVVKGNQKRLESLRELAGKENLEYPSVTLPPQPHTKEGVDAYNEVIARVRMWVNLNLWQKLKLSRDDAKPLLRLKGFPSFHPLVERQANEVDWWDMVCNVKKLINEKKEDGKVFWQNLAGYKRQEALRPYLSSEEDRKKGKKFARYQLGDLLLHLEKKHGEDWGKVYDEAWERIDKKVEGLSKHIKLEEERRSEDAQSKAALTDWLRAKASFVIEGLKEADKDEFCRCELKLQKWYGDLRGKPFAIEAENSILDISGFSKQYNCAFIWQKDGVKKLNLYLIINYFKGGKLRFKKIKPEAFEANRFYTVINKKSGEIVPMEVNFNFDDPNLIILPLAFGKRQGREFIWNDLLSLETGSLKLANGRVIEKTLYNRRTRQDEPALFVALTFERREVLDSSNIKPMNLIGVDRGENIPAVIALTDPEGCPLSRFKDSLGNPTHILRIGESYKEKQRTIQAKKEVEQRRAGGYSRKYASKAKNLADDMVRNTARDLLYYAVTQDAMLIFENLSRGFGRQGKRTFMAERQYTRMEDWLTAKLAYEGLPSKTYLSKTLAQYTSKTCSNCGFTITSADYDRVLEKLKKTATGWMTTINGKELKVEGQITYYNRYKRQNVVKDLSVELDRLSEESVNNDISSWTKGRSGEALSLLKKRFSHRPVQEKFVCLNCGFETHADEQAALNIARSWLFLRSQEYKKYQTNKTTGNTDKRAFVETWQSFYRKKLKEVWKPAV

SEQ ID NO: 304 - protein, 979 aa, synthetic construct
QEIKRINKIRRRLVKDSNTKKAGKTGPMKTLLVRVMTPDLRERLENLRKKPENIPQPISNTSRANLNKLLTDYTEMKKAILHVYWEEFQKDPVGLMSRVAQPASKKIDQNKLKPEMDEKGNLTTAGFACSQCGQPLFVYKLEQVSEKGKAYTNYFGRCNVAEHEKLILLAQLKPEKDSDEAVTYSLGKFGQRALDFYSIHVTKESTHPVKPLAQIAGNRYASGPVGKALSDACMGTIASFLSKYQDIIIEHQKVVKGNQKRLESLRELAGKENLEYPSVTLPPQPHTKEGVDAYNEVIARVRMWVNLNLWQKLKLSRDDAKPLLRLKGFPSFPLVERQANEVDQWWDMVCNVKKLINEKKEDGKVFWQNLAGYKRQEALRPYLSSEEDRKKGKKFARYQLGDLLLHLEKKHGEDWGKVYDEAWERIDKKVEGLSKHIKLEEERRSEDAQSKAALTDWLRAKASFVIEGLKEADKDEFCRCELKLQKWYGDLRGKPFAIEAENSILDISGFSKQYNCAFIWQKDGVKKLNLYLIINYFKGGKLRFKKIKPEAFEANRFYTVINKKSGEIVPMEVNFNFDDPNLIILPLAFGKRQGREFIWNDLLSLETGSLKLANGRVIEKTLYNRRTRQDEPALFVALTFERREVLDSSNIKPMNLIGVDRGENIPAVIALTDPEGCPLSRFKDSLGNPTHILRIGESYKEKQRTIQAKKEVEQRRAGGYSRKYASKAKNLADDMVRNTARDLLYYAVTQDAMLIFENLSRGFGRQGKRTFMAERQYTRMEDWLTAKLAYEGLPSKTYLSKTLAQYTSKTCSNCGFTITSADYDRVLEKLKKTATGWMTTINGKELKVEGQITYYNRYKRQNVVKDLSVELDRLSEESVNNDISSWTKGRSGEALSLLKKRFSHRPVQEKFVCLNCGFETHADEQAALNIARSWLFLRSQEYKKYQTNKTTGNTDKRAFVETWQSFYRKKLKEVWKPAV

SEQ ID NO: 305 - protein, 978 aa, synthetic construct
QEIKRINKIRRRLVKDSNTKKAGKTGPMKTLLVRVMTPDLRERLENLRKKPENIPQPISNTSRANLNKLLTDYTEMKKAILHVYWEEFQKDPVGLMSRVAQPASKKIDQNKLKPEMDEKGNLTTAGFACSQCGQPLFVYKLEQVSEKGKAYTNYFGRCNVAEHEKLILLAQLKPEKDSDEAVTYSLGKFGQRALDFYSIHVTKESTHPVKPLAQIAGNRYASGPVGKALSDACMGTIASFLSKYQDIIIEHQKVVKGNQKRLESLRELAGKENLEYPSVTLPPQPHTKEGVDAYNEVIARVRMWVNLNLWQKLKLSRDDAKPLLRLKGFPSFPLPERQANEVDWWDMVCNVKKLINEKKEDGKVFWQNLAGYKRQEALRPYLSSEEDRKKGKKFARYQLGDLLLHLEKKHGEDWGKVYDEAWERIDKKVEGLSKHIKLEEERRSEDAQSKAALTDWLRAKASFVIEGLKEADKDEFCRCELKLQKWYGDLRGKPFAIEAENSILDISGFSKQYNCAFIWQKDGVKKLNLYLIINYFKGGKLRFKKIKPEAFEANRFYTVINKKSGEIVPMEVNFNFDDPNLIILPLAFGKRQGREFIWNDLLSLETGSLKLANGRVIEKTLYNRRTRQDEPALFVALTFERREVLDSSNIKPMNLIGVDRGENIPAVIALTDPEGCPLSRFKDSLGNPTHILRIGESYKEKQRTIQAKKEVEQRRAGGYSRKYASKAKNLADDMVRNTARDLLYYAVTQDAMLIFENLSRGFGRQGKRTFMAERQYTRMEDWLTAKLAYEGLPSKTYLSKTLAQYTSKTCSNCGFTITSADYDRVLEKLKKTATGWMTTINGKELKVEGQITYYNRYKRQNVVKDLSVELDRLSEESVNNDISSWTKGRSGEALSLLKKRFSHRPVQEKFVCLNCGFETHADEQAALNIARSWLFLRSQEYKKYQTNKTTGNTDKRAFVETWQSFYRKKLKEVWKPAV

SEQ ID NO: 306 - protein, 978 aa, synthetic construct
QEIKRINKIRRRLVKDSNTKKAGKTGPMKTLLVRVMTPDLRERLENLRKKPENIPQPISNTSRANLNKLLTDYTEMKKAILHVYWEEFQKDPVGLMSRVAQPASKKIDQNKLKPEMDEKGNLTTAGFACSQCGQPLFVYKLEQVSEKGKAYTNYFGRCNVAEHEKLIDLAQLKPEKDSDEAVTYSLGKFGQRALDFYSIHVTKESTHPVKPLAQIAGNRYASGPVGKALSDACMGTIASFLSKYQDIIIEHQKVVKGNQKRLESLRELAGKENLEYPSVTLPPQPHTKEGVDAYNEVIARVRMWVNLNLWQKLKLSRDDAKPLLRLKGFPSFPLVERQANEVDWWDMVCNVKKLINEKKEDGKVFWQNLAGYKRQEALRPYLSSEEDRKKGKKFARYQLGDLLLHLEKKHGEDWGKVYDEAWERIDKKVEGLSKHIKLEEERRSEDAQSKAALTDWLRAKASFVIEGLKEADKDEFCRCELKLQKWYGDLRGKPFAIEAENSILDISGFSKQYNCAFIWQKDGVKKLNLYLIINYFKGGKLRFKKIKPEAFEANRFYTVINKKSGEIVPMEVNFNFDDPNLIILPLAFGKRQGREFIWNDLLSLETGSLKLANGRVIEKTLYNRRTRQDEPALFVALTFERREVLDSSNIKPMNLIGVDRGENIPAVIALTDPEGCPLSRFKDSLGNPTHILRIGESYKEKQRTIQAKKEVEQRRAGGYSRKYASKAKNLADDMVRNTARDLLYYAVTQDAMLIFENLSRGFGRQGKRTFMAERQYTRMEDWLTAKLAYEGLPSKTYLSKTLAQYTSKTCSNCGFTITSADYDRVLEKLKKTATGWMTTINGKELKVEGQITYYNRYKRQNVVKDLSVELDRLSEESVNNDISSWTKGRSGEALSLLKKRFSHRPVQEKFVCLNCGFETHADEQAALNIARSWLFLRSQEYKKYQTNKTTGNTDKRAFVETWQSFYRKKLKEVWKPAV

SEQ ID NO: 307 - protein, 978 aa, synthetic construct
QEIKRINKIRRRLVKDSNTKKAGKTGPMKTLLVRVMTPDLRERLENLRKKPENIPQPISNTSRANLNKLLTDYTEMKKAILHVYWEEFQKDPVGLMSRVAQPASKKIDQNKLKPEMDEKGNLTTAGFACSQCGQPLFVYKLEQVSEKGKAYTNYFGRCNVAEHEKLIELAQLKPEKDSDEAVTYSLGKFGQRALDFYSIHVTKESTHPVKPLAQIAGNRYASGPVGKALSDACMGTIASFLSKYQDIIIEHQKVVKGNQKRLESLRELAGKENLEYPSVTLPPQPHTKEGVDAYNEVIARVRMWVNLNLWQKLKLSRDDAKPLLRLKGFPSFPLVERQANEVDWWDMVCNVKKLINEKKEDGKVFWQNLAGYKRQEALRPYLSSEEDRKKGKKFARYQLGDLLLHLEKKHGEDWGKVYDEAWERIDKKVEGLSKHIKLEEERRSEDAQSKAALTDWLRAKASFVIEGLKEADKDEFCRCELKLQKWYGDLRGKPFAIEAENSILDISGFSKQYNCAFIWQKDGVKKLNLYLIINYFKGGKLRFKKIKPEAFEANRFYTVINKKSGEIVPMEVNFNFDDPNLIILPLAFGKRQGREFIWNDLLSLETGSLKLANGRVIEKTLYNRRTRQDEPALFVALTFERREVLDSSNIKPMNLIGVDRGENIPAVIALTDPEGCPLSRFKDSLGNPTHILRIGESYKEKQRTIQAKKEVEQRRAGGYSRKYASKAKNLADDMVRNTARDLLYYAVTQDAMLIFENLSRGFGRQGKRTFMAERQYTRMEDWLTAKLAYEGLPSKTYLSKTLAQYTSKTCSNCGFTITSADYDRVLEKLKKTATGWMTTINGKELKVEGQITYYNRYKRQNVVKDLSVELDRLSEESVNNDISSWTKGRSGEALSLLKKRFSHRPVQEKFVCLNCGFETHADEQAALNIARSWLFLRSQEYKKYQTNKTTGNTDKRAFVETWQSFYRKKLKEVWKPAV

SEQ ID NO: 308 - protein, 979 aa, synthetic construct
QEIKRINKIRRRLVKDSNTKKAGKTPGPMKTLLVRVMTPDLRERLENLRKKPENIPQPISNTSRANLNKLLTDYTEMKKAILHVYWEEFQKDPVGLMSRVAQPASKKIDQNKLKPEMDEKGNLTTAGFACSQCGQPLFVYKLEQVSEKGKAYTNYFGRCNVAEHEKLILLAQLKPEKDSDEAVTYSLGKFGQRALDFYSIHVTKESTHPVKPLAQIAGNRYASGPVGKALSDACMGTIASFLSKYQDIIIEHQKVVKGNQKRLESLRELAGKENLEYPSVTLPPQPHTKEGVDAYNEVIARVRMWVNLNLWQKLKLSRDDAKPLLRLKGFPSFPLVERQANEVDWWDMVCNVKKLINEKKEDGKVFWQNLAGYKRQEALRPYLSSEEDRKKGKKFARYQLGDLLLHLEKKHGEDWGKVYDEAWERIDKKVEGLSKHIKLEEERRSEDAQSKAALTDWLRAKASFVIEGLKEADKDEFCRCELKLQKWYGDLRGKPFAIEAENSILDISGFSKQYNCAFIWQKDGVKKLNLYLIINYFKGGKLRFKKIKPEAFEANRFYTVINKKSGEIVPMEVNFNFDDPNLIILPLAFGKRQGREFIWNDLLSLETGSLKLANGRVIEKTLYNRRTRQDEPALFVALTFERREVLDSSNIKPMNLIGVDRGENIPAVIALTDPEGCPLSRFKDSLGNPTHILRIGESYKEKQRTIQAKKEVEQRRAGGYSRKYASKAKNLADDMVRNTARDLLYYAVTQDAMLIFENLSRGFGRQGKRTFMAERQYTRMEDWLTAKLAYEGLPSKTYLSKTLAQYTSKTCSNCGFTITSADYDRVLEKLKKTATGWMTTINGKELKVEGQITYYNRYKRQNVVKDLSVELDRLSEESVNNDISSWTKGRSGEALSLLKKRFSHRPVQEKFVCLNCGFETHADEQAALNIARSWLFLRSQEYKKYQTNKTTGNTDKRAFVETWQSFYRKKLKEVWKPAV

SEQ ID NO: 309 - protein, 978 aa, synthetic construct
QEIKRINKIRRRLVKDSNTKKAGKTGPPKTLLVRVMTPDLRERLENLRKKPENIPQPISNTSRANLNKLLTDYTEMKKAILHVYWEEFQKDPVGLMSRVAQPASKKIDQNKLKPEMDEKGNLTTAGFACSQCGQPLFVYKLEQVSEKGKAYTNYFGRCNVAEHEKLILLAQLKPEKDSDEAVTYSLGKFGQRALDFYSIHVTKESTHPVKPLAQIAGNRYASGPVGKALSDACMGTIASFLSKYQDIIIEHQKVVKGNQKRLESLRELAGKENLEYPSVTLPPQPHTKEGVDAYNEVIARVRMWVNLNLWQKLKLSRDDAKPLLRLKGFPSFPLVERQANEVDWWDMVCNVKKLINEKKEDGKVFWQNLAGYKRQEALRPYLSSEEDRKKGKKFARYQLGDLLLHLEKKHGEDWGKVYDEAWERIDKKVEGLSKHIKLEEERRSEDAQSKAALTDWLRAKASFVIEGLKEADKDEFCRCELKLQKWYGDLRGKPFAIEAENSILDISGFSKQYNCAFIWQKDGVKKLNLYLIINYFKGGKLRFKKIKPEAFEANRFYTVINKKSGEIVPMEVNFNFDDPNLIILPLAFGKRQGREFIWNDLLSLETGSLKLANGRVIEKTLYNRRTRQDEPALFVALTFERREVLDSSNIKPMNLIGVDRGENIPAVIALTDPEGCPLSRFKDSLGNPTHILRIGESYKEKQRTIQAKKEVEQRRAGGYSRKYASKAKNLADDMVRNTARDLLYYAVTQDAMLIFENLSRGFGRQGKRTFMAERQYTRMEDWLTAKLAYEGLPSKTYLSKTLAQYTSKTCSNCGFTITSADYDRVLEKLKKTATGWMTTINGKELKVEGQITYYNRYKRQNVVKDLSVELDRLSEESVNNDISSWTKGRSGEALSLLKKRFSHRPVQEKFVCLNCGFETHADEQAALNIARSWLFLRSQEYKKYQTNKTTGNTDKRAFVETWQSFYRKKLKEVWKPAV

SEQ ID NO: 310 - protein, 977 aa, synthetic construct
QEIKRINKIRRRLVKDSNTKKAGKTGPMKTLLVRVMTPDLRERLENLRKKPENIPQPISNTSRANLNKLLTDYTEMKKAILHVYWEEFQKDPVGLMSRVAQPASKKIDQNKLKPEMDEKGNLTTAGFACQCGQPLFVYKLEQVSEKGKAYTNYFGRCNVAEHEKLILLAQLKPEKDSDEAVTYSLGKFGQRALDFYSIHVTKESTHPVKPLAQIAGNRYASGPVGKALSDACMGTIASFLSKYQDIIIEHQKVVKGNQKRLESLRELAGKENLEYPSVTLPPQPHTKEGVDAYNEVIARVRMWVNLNLWQKLKLSRDDAKPLLRLKGFPSFPLVERQANEVDWWDMVCNVKKLINEKKEDGKVFWQNLAGYKRQEALRPYLSSEEDRKKGKKFARYQLGDLLLHLEKKHGEDWGKVYDEAWERIDKKVEGLSKHIKLEEERRSEDAQSKAALTDWLRAKASFVIEGLKEADKDEFCRCELKLQKWYGDLRGKPFAIEAENSILDISGFSKQYNCAFIWQKDGVKKLNLYLIINYFKGGKLRFKKIKPEAFEANRFYTVINKKSGEIVPMEVNFNFDDPNLIILPLAFGKRQGREFIWNDLLSLETGSLKLANGRVIEKTLYNRRTRQDEPALFVALTFERREVLDSSNIKPMNLIGVDRGENIPAVIALTDPEGCPLSRFKDSLGNPTHILRIGESYKEKQRTIQAKKEVEQRRAGGYSRKYASKAKNLADDMVRNTARDLLYYAVTQDAMLIFENLSRGFGRQGKRTFMAERQYTRMEDWLTAKLAYEGLPSKTYLSKTLAQYTSKTCSNCGFTITSADYDRVLEKLKKTATGWMTTINGKELKVEGQITYYNRYKRQNVVKDLSVELDRLSEESVNNDISSWTKGRSGEALSLLKKRFSHRPVQEKFVCLNCGFETHADEQAALNIARSWLFLRSQEYKKYQTNKTTGNTDKRAFVETWQSFYRKKLKEVWKPAV

SEQ ID NO: 311 - protein, 978 aa, synthetic construct
QEIKRINKIRRRLVKDSNTKKAGKTGPMKTLLVRVMTPDLRERLENLRKKPENIPQPISNTSRANLNKLLTDYTEMKKAILHVYWEEFQKDPVGLMSRVAQPASKKIDQNKLKPEMDEKGNLTTAGFACSQCGQPLFVYKLEQVSEKGKAYTNYFGRCNVAEHEKLILLAQLKPEKDSDEAVTYSLGKFGQRALDFYSIHVTKESTHPVKPLAQIAGNRYASGPVGKALSDACMGTIASFLSKYHDIIIEHQKVVKGNQKRLESLRELAGKENLEYPSVTLPPQPHTKEGVDAYNEVIARVRMWVNLNLWQKLKLSRDDAKPLLRLKGFPSFPLVERQANEVDWWDMVCNVKKLINEKKEDGKVFWQNLAGYKRQEALRPYLSSEEDRKKGKKFARYQLGDLLLHLEKKHGEDWGKVYDEAWERIDKKVEGLSKHIKLEEERRSEDAQSKAALTDWLRAKASFVIEGLKEADKDEFCRCELKLQKWYGDLRGKPFAIEAENSILDISGFSKQYNCAFIWQKDGVKKLNLYLIINYFKGGKLRFKKIKPEAFEANRFYTVINKKSGEIVPMEVNFNFDDPNLIILPLAFGKRQGREFIWNDLLSLETGSLKLANGRVIEKTLYNRRTRQDEPALFVALTFERREVLDSSNIKPMNLIGVDRGENIPAVIALTDPEGCPLSRFKDSLGNPTHILRIGESYKEKQRTIQAKKEVEQRRAGGYSRKYASKAKNLADDMVRNTARDLLYYAVTQDAMLIFENLSRGFGRQGKRTFMAERQYTRMEDWLTAKLAYEGLPSKTYLSKTLAQYTSKTCSNCGFTITSADYDRVLEKLKKTATGWMTTINGKELKVEGQITYYNRYKRQNVVKDLSVELDRLSEESVNNDISSWTKGRSGEALSLLKKRFSHRPVQEKFVCLNCGFETHADEQAALNIARSWLFLRSQEYKKYQTNKTTGNTDKRAFVETWQSFYRKKLKEVWKPAV

SEQ ID NO: 312 - protein, 978 aa, synthetic construct
QEIKRINKIRRRLVKDSNTKKAGKTGPMKTLLVRVMTPDLRERLENLRKKPENIPQPISNTSRANLNKLLTDYTEMKKAILHVYWEEFQKDPVGLMSRVAQPASKKIDQNKLKPEMDEKGNLTTAGFACSQCGQPLFVYKLEQVSEKGKAYTNYFGRCNVAEHEKLILLAQLKPEKDSDEAVTYSLGKFGQRALDFYSIHVTKESTHPVKPLAQIAGNRYASGPVGKALSDACMGTIAHFLSKYQDIIIEHQKVVKGNQKRLESLRELAGKENLEYPSVTLPPQPHTKEGVDAYNEVIARVRMWVNLNLWQKLKLSRDDAKPLLRLKGFPSFPLVERQANEVDWWDMVCNVKKLINEKKEDGKVFWQNLAGYKRQEALRPYLSSEEDRKKGKKFARYQLGDLLLHLEKKHGEDWGKVYDEAWERIDKKVEGLSKHIKLEEERRSEDAQSKAALTDWLRAKASFVIEGLKEADKDEFCRCELKLQKWYGDLRGKPFAIEAENSILDISGFSKQYNCAFIWQKDGVKKLNLYLIINYFKGGKLRFKKIKPEAFEANRFYTVINKKSGEIVPMEVNFNFDDPNLIILPLAFGKRQGREFIWNDLLSLETGSLKLANGRVIEKTLYNRRTRQDEPALFVALTFERREVLDSSNIKPMNLIGVDRGENIPAVIALTDPEGCPLSRFKDSLGNPTHILRIGESYKEKQRTIQAKKEVEQRRAGGYSRKYASKAKNLADDMVRNTARDLLYYAVTQDAMLIFENLSRGFGRQGKRTFMAERQYTRMEDWLTAKLAYEGLPSKTYLSKTLAQYTSKTCSNCGFTITSADYDRVLEKLKKTATGWMTTINGKELKVEGQITYYNRYKRQNVVKDLSVELDRLSEESVNNDISSWTKGRSGEALSLLKKRFSHRPVQEKFVCLNCGFETHADEQAALNIARSWLFLRSQEYKKYQTNKTTGNTDKRAFVETWQSFYRKKLKEVWKPAV

SEQ ID NO: 313 - protein, 978 aa, synthetic construct
QEIKRINKIRRRLVKDSNTKKAGKTGPMKTLLVRVMTPDLRERLENLRKKPENIPQPISNTSRANLNKLLTDYTEMKKAILHVYWEEFQKDPVGLMSRVAQPASKKIDQNKLKPEMDEKGNLTTAGFACSQCGQPLFVYKLEQVSEKGKAYTNYFGRCNVAEHEKLILLAQLKPEKDSDEAVTYSLGKFGQRALDFYSIHVTKESTHPVKPLAQIAGNRYASGPVGKALSDACMGTIATFLSKYQDIIIEHQKVVKGNQKRLESLRELAGKENLEYPSVTLPPQPHTKEGVDAYNEVIARVRMWVNLNLWQKLKLSRDDAKPLLRLKGFPSFPLVERQANEVDWWDMVCNVKKLINEKKEDGKVFWQNLAGYKRQEALRPYLSSEEDRKKGKKFARYQLGDLLLHLEKKHGEDWGKVYDEAWERIDKKVEGLSKHIKLEEERRSEDAQSKAALTDWLRAKASFVIEGLKEADKDEFCRCELKLQKWYGDLRGKPFAIEAENSILDISGFSKQYNCAFIWQKDGVKKLNLYLIINYFKGGKLRFKKIKPEAFEANRFYTVINKKSGEIVPMEVNFNFDDPNLIILPLAFGKRQGREFIWNDLLSLETGSLKLANGRVIEKTLYNRRTRQDEPALFVALTFERREVLDSSNIKPMNLIGVDRGENIPAVIALTDPEGCPLSRFKDSLGNPTHILRIGESYKEKQRTIQAKKEVEQRRAGGYSRKYASKAKNLADDMVRNTARDLLYYAVTQDAMLIFENLSRGFGRQGKRTFMAERQYTRMEDWLTAKLAYEGLPSKTYLSKTLAQYTSKTCSNCGFTITSADYDRVLEKLKKTATGWMTTINGKELKVEGQITYYNRYKRQNVVKDLSVELDRLSEESVNNDISSWTKGRSGEALSLLKKRFSHRPVQEKFVCLNCGFETHADEQAALNIARSWLFLRSQEYKKYQTNKTTGNTDKRAFVETWQSFYRKKLKEVWKPAV

SEQ ID NO: 314 - protein, 978 aa, synthetic construct
QEIKRINKIRRRLVKDSNTKKAGKTGPMKTLLVRVMTPDLRERLENLRKKPENIPQPISNTSRANLNKLLTDYTEMKKAILHVYWEEFQKDPVGLMSRVAQPASKKIDQNKLKPEMDEKGNLTTAGFACSQCGQPLFVYKLEQVSEKGKAYTNYFGRCNVAEHEKLILLAQLKPEKDSDEAVTYSLGKFGQRALDFYSIHVTKESTHPVKPLAQIAGNRYASGPVGKALSDACMGTIASFLSKYQDIIIEHQKVVKGNQKRLESLRELAGKENLEYPSVTLPPQPHTDEGVDAYNEVIARVRMWVNLNLWQKLKLSRDDAKPLLRLKGFPSFPLVERQANEVDWWDMVCNVKKLINEKKEDGKVFWQNLAGYKRQEALRPYLSSEEDRKKGKKFARYQLGDLLLHLEKKHGEDWGKVYDEAWERIDKKVEGLSKHIKLEEERRSEDAQSKAALTDWLRAKASFVIEGLKEADKDEFCRCELKLQKWYGDLRGKPFAIEAENSILDISGFSKQYNCAFIWQKDGVKKLNLYLIINYFKGGKLRFKKIKPEAFEANRFYTVINKKSGEIVPMEVNFNFDDPNLIILPLAFGKRQGREFIWNDLLSLETGSLKLANGRVIEKTLYNRRTRQDEPALFVALTFERREVLDSSNIKPMNLIGVDRGENIPAVIALTDPEGCPLSRFKDSLGNPTHILRIGESYKEKQRTIQAKKEVEQRRAGGYSRKYASKAKNLADDMVRNTARDLLYYAVTQDAMLIFENLSRGFGRQGKRTFMAERQYTRMEDWLTAKLAYEGLPSKTYLSKTLAQYTSKTCSNCGFTITSADYDRVLEKLKKTATGWMTTINGKELKVEGQITYYNRYKRQNVVKDLSVELDRLSEESVNNDISSWTKGRSGEALSLLKKRFSHRPVQEKFVCLNCGFETHADEQAALNIARSWLFLRSQEYKKYQTNKTTGNTDKRAFVETWQSFYRKKLKEVWKPAV

SEQ ID NO: 315 - protein, 978 aa, synthetic construct
QEIKRINKIRRRLVKDSNTKKAGKTGPMKTLLVRVMTPDLRERLENLRKKPENIPQPISNTSRANLNKLLTDYTEMKKAILHVYWEEFQKDPVGLMSRVAQPASKKIDQNKLKPEMDEKGNLTTAGFACSQCGQPLFVYKLEQVSEKGKAYTNYFGRCNVAEHEKLILLAQLKPEKDSDEAVTYSLGKFGQRALDFYSIHVTKESTHPVKPLAQIAGNRYASGPVGKALSDACMGTIASFLSKYQDIIIEHQKVVKGNQKRLESLRELAGKENLEYPSVTLPPQPHTEEGVDAYNEVIARVRMWVNLNLWQKLKLSRDDAKPLLRLKGFPSFPLVERQANEVDWWDMVCNVKKLINEKKEDGKVFWQNLAGYKRQEALRPYLSSEEDRKKGKKFARYQLGDLLLHLEKKHGEDWGKVYDEAWERIDKKVEGLSKHIKLEEERRSEDAQSKAALTDWLRAKASFVIEGLKEADKDEFCRCELKLQKWYGDLRGKPFAIEAENSILDISGFSKQYNCAFIWQKDGVKKLNLYLIINYFKGGKLRFKKIKPEAFEANRFYTVINKKSGEIVPMEVNFNFDDPNLIILPLAFGKRQGREFIWNDLLSLETGSLKLANGRVIEKTLYNRRTRQDEPALFVALTFERREVLDSSNIKPMNLIGVDRGENIPAVIALTDPEGCPLSRFKDSLGNPTHILRIGESYKEKQRTIQAKKEVEQRRAGGYSRKYASKAKNLADDMVRNTARDLLYYAVTQDAMLIFENLSRGFGRQGKRTFMAERQYTRMEDWLTAKLAYEGLPSKTYLSKTLAQYTSKTCSNCGFTITSADYDRVLEKLKKTATGWMTTINGKELKVEGQITYYNRYKRQNVVKDLSVELDRLSEESVNNDISSWTKGRSGEALSLLKKRFSHRPVQEKFVCLNCGFETHADEQAALNIARSWLFLRSQEYKKYQTNKTTGNTDKRAFVETWQSFYRKKLKEVWKPAV

SEQ ID NO: 316 - protein, 978 aa, synthetic construct
QEIKRINKIRRRLVKDSNTKKAGKTGPMKTLLVRVMTPDLRERLENLRKKPENIPQPISNTSRANLNKLLTDYTEMKKAILHVYWEEFQKDPVGLMSRVAQPASKKIDQNKLKPEMDEKGNLTTAGFACSQCGQPLFVYKLEQVSEKGKAYTNYFGRCNVAEHEKLILLAQLKPEKDSDEAVTYSLGKFGQRALDFYSIHVTKESTHPVKPLAQIAGNRYASGPVGKALSDACMGTIASFLSKYQDIIIEHQKVVKGNQKRLESLRELAGKENLEYPSVTLPPQPHTKEGVDAYNEVIARVRMWVNLNLWQKLKLSRDDAKPLLRLKRFPSFPLVERQANEVDWWDMVCNVKKLINEKKEDGKVFWQNLAGYKRQEALRPYLSSEEDRKKGKKFARYQLGDLLLHLEKKHGEDWGKVYDEAWERIDKKVEGLSKHIKLEEERRSEDAQSKAALTDWLRAKASFVIEGLKEADKDEFCRCELKLQKWYGDLRGKPFAIEAENSILDISGFSKQYNCAFIWQKDGVKKLNLYLIINYFKGGKLRFKKIKPEAFEANRFYTVINKKSGEIVPMEVNFNFDDPNLIILPLAFGKRQGREFIWNDLLSLETGSLKLANGRVIEKTLYNRRTRQDEPALFVALTFERREVLDSSNIKPMNLIGVDRGENIPAVIALTDPEGCPLSRFKDSLGNPTHILRIGESYKEKQRTIQAKKEVEQRRAGGYSRKYASKAKNLADDMVRNTARDLLYYAVTQDAMLIFENLSRGFGRQGKRTFMAERQYTRMEDWLTAKLAYEGLPSKTYLSKTLAQYTSKTCSNCGFTITSADYDRVLEKLKKTATGWMTTINGKELKVEGQITYYNRYKRQNVVKDLSVELDRLSEESVNNDISSWTKGRSGEALSLLKKRFSHRPVQEKFVCLNCGFETHADEQAALNIARSWLFLRSQEYKKYQTNKTTGNTDKRAFVETWQSFYRKKLKEVWKPAV

SEQ ID NO: 317 - protein, 978 aa, synthetic construct
QEIKRINKIRRRLVKDSNTKKAGKTGPMKTLLVRVMTPDLRERLENLRKKPENIPQPISNTSRANLNKLLTDYTEMKKAILHVYWEEFQKDPVGLMSRVAQPASKKIDQNKLKPEMDEKGNLTTAGFACSQCGQPLFVYKLEQVSEKGKAYTNYFGRCNVAEHEKLILLAQLKPEKDSDEAVTYSLGKFGQRALDFYSIHVTKESTHPVKPLAQIAGNRYASGPVGKALSDACMGTIASFLSKYQDIIIEHQKVVKGNQKRLESLRELAGKENLEYPSVTLPPQPHTKEGVDAYNEVIARVRMWVNKNLWQKLKLSRDDAKPLLRLKGFPSFPLVERQANEVDWWDMVCNVKKLINEKKEDGKVFWQNLAGYKRQEALRPYLSSEEDRKKGKKFARYQLGDLLLHLEKKHGEDWGKVYDEAWERIDKKVEGLSKHIKLEEERRSEDAQSKAALTDWLRAKASFVIEGLKEADKDEFCRCELKLQKWYGDLRGKPFAIEAENSILDISGFSKQYNCAFIWQKDGVKKLNLYLIINYFKGGKLRFKKIKPEAFEANRFYTVINKKSGEIVPMEVNFNFDDPNLIILPLAFGKRQGREFIWNDLLSLETGSLKLANGRVIEKTLYNRRTRQDEPALFVALTFERREVLDSSNIKPMNLIGVDRGENIPAVIALTDPEGCPLSRFKDSLGNPTHILRIGESYKEKQRTIQAKKEVEQRRAGGYSRKYASKAKNLADDMVRNTARDLLYYAVTQDAMLIFENLSRGFGRQGKRTFMAERQYTRMEDWLTAKLAYEGLPSKTYLSKTLAQYTSKTCSNCGFTITSADYDRVLEKLKKTATGWMTTINGKELKVEGQITYYNRYKRQNVVKDLSVELDRLSEESVNNDISSWTKGRSGEALSLLKKRFSHRPVQEKFVCLNCGFETHADEQAALNIARSWLFLRSQEYKKYQTNKTTGNTDKRAFVETWQSFYRKKLKEVWKPAV

SEQ ID NO: 318 - protein, 978 aa, synthetic construct
QEIKRINKIRRRLVKDSNTKKAGKTGPMKTLLVRVMTPDLRERLENLRKKPENIPQPISNTSRANLNKLLTDYTEMKKAILHVYWEEFQKDPVGLMSRVAQPASKKIDQNKLKPEMDEKGNLTTAGFACSQCGQPLFVYKLEQVSEKGKAYTNYFGRCNVAEHEKLILLAQLKPEKDSDEAVTYSLGKFGQRALDFYSIHVTKESTHPVKPLAQIAGNRYASGPVGKALSDACMGTIASFLSKYQDIIIEHQKVVKGNQKRLESLRELAGKENLEYPSVTLPPQPHTKEGVDAYNEVIARVRRWVNLNLWQKLKLSRDDAKPLLRLKGFPSFPLVERQANEVDWWDMVCNVKKLINEKKEDGKVFWQNLAGYKRQEALRPYLSSEEDRKKGKKFARYQLGDLLLHLEKKHGEDWGKVYDEAWERIDKKVEGLSKHIKLEEERRSEDAQSKAALTDWLRAKASFVIEGLKEADKDEFCRCELKLQKWYGDLRGKPFAIEAENSILDISGFSKQYNCAFIWQKDGVKKLNLYLIINYFKGGKLRFKKIKPEAFEANRFYTVINKKSGEIVPMEVNFNFDDPNLIILPLAFGKRQGREFIWNDLLSLETGSLKLANGRVIEKTLYNRRTRQDEPALFVALTFERREVLDSSNIKPMNLIGVDRGENIPAVIALTDPEGCPLSRFKDSLGNPTHILRIGESYKEKQRTIQAKKEVEQRRAGGYSRKYASKAKNLADDMVRNTARDLLYYAVTQDAMLIFENLSRGFGRQGKRTFMAERQYTRMEDWLTAKLAYEGLPSKTYLSKTLAQYTSKTCSNCGFTITSADYDRVLEKLKKTATGWMTTINGKELKVEGQITYYNRYKRQNVVKDLSVELDRLSEESVNNDISSWTKGRSGEALSLLKKRFSHRPVQEKFVCLNCGFETHADEQAALNIARSWLFLRSQEYKKYQTNKTTGNTDKRAFVETWQSFYRKKLKEVWKPAV

SEQ ID NO: 319 - protein, 978 aa, synthetic construct
QEIKRINKIRRRLVKDSNTKKAGKTGPMKTLLVRVMTPDLRERLENLRKKPENIPQPISNTSRANLNKLLTDYTEMKKAILHVYWEEFQKDPVGLMSRVAQPASKKIDQNKLKPEMDEKGNLTTAGFACSQCGQPLFVYKLEQVSEKGKAYTNYFGRCNVAEHEKLILLAQLKPEKDSDEAVTYSLGKFGQRALDFYSIHVTKESTHPVKPLAQIAGNRYASGPVGKALSDACMGTIASFLSKYQDIIIEHQKVVKGNQKRLESLRELAGKENLEYPSVTLPPQPHTKEGVDAYNEVIARVRKWVNLNLWQKLKLSRDDAKPLLRLKGFPSFPLVERQANEVDWWDMVCNVKKLINEKKEDGKVFWQNLAGYKRQEALRPYLSSEEDRKKGKKFARYQLGDLLLHLEKKHGEDWGKVYDEAWERIDKKVEGLSKHIKLEEERRSEDAQSKAALTDWLRAKASFVIEGLKEADKDEFCRCELKLQKWYGDLRGKPFAIEAENSILDISGFSKQYNCAFIWQKDGVKKLNLYLIINYFKGGKLRFKKIKPEAFEANRFYTVINKKSGEIVPMEVNFNFDDPNLIILPLAFGKRQGREFIWNDLLSLETGSLKLANGRVIEKTLYNRRTRQDEPALFVALTFERREVLDSSNIKPMNLIGVDRGENIPAVIALTDPEGCPLSRFKDSLGNPTHILRIGESYKEKQRTIQAKKEVEQRRAGGYSRKYASKAKNLADDMVRNTARDLLYYAVTQDAMLIFENLSRGFGRQGKRTFMAERQYTRMEDWLTAKLAYEGLPSKTYLSKTLAQYTSKTCSNCGFTITSADYDRVLEKLKKTATGWMTTINGKELKVEGQITYYNRYKRQNVVKDLSVELDRLSEESVNNDISSWTKGRSGEALSLLKKRFSHRPVQEKFVCLNCGFETHADEQAALNIARSWLFLRSQEYKKYQTNKTTGNTDKRAFVETWQSFYRKKLKEVWKPAV

SEQ ID NO: 320 - protein, 978 aa, synthetic construct
QEIKRINKIRRRLVKDSNTKKAGKTGPMKTLLVRVMTPDLRERLENLRKKPENIPQPISNTSRANLNKLLTDYTEMKKAILHVYWEEFQKDPVGLMSRVAQPASKKIDQNKLKPEMDEKGNLTTAGFACSQCGQPLFVYKLEQVSEKGKAYTNYFGRCNVAEHEKLILLAQLKPEKDSDEAVTYSLGKFGQRALDFYSIHVTKESTHPVKPLAQIAGNRYASGPVGKALSDACMGTIASFLSKYQDIIIEHQKVVKGNQKRLESLRELAGKENLEYPSVTLPPQPHTKEGVDAYNEVIARVRMWVNLNLWQKLKLSRDDAKPLLRLKGFPSFPLVERQANEVDWWDMVCNVKKLINEKKEDGKVFWQNLAGYKRQEALRPYLSSEEDRKKGKKFARYQLGDLLLHLEKKHGEDWGKVYDEAWERIDKKVEGLSKHIKLEEERRSEDAQSKAALTDWLRAKASFVIEGLKEADKDEFRRCELKLQKWYGDLRGKPFAIEAENSILDISGFSKQYNCAFIWQKDGVKKLNLYLIINYFKGGKLRFKKIKPEAFEANRFYTVINKKSGEIVPMEVNFNFDDPNLIILPLAFGKRQGREFIWNDLLSLETGSLKLANGRVIEKTLYNRRTRQDEPALFVALTFERREVLDSSNIKPMNLIGVDRGENIPAVIALTDPEGCPLSRFKDSLGNPTHILRIGESYKEKQRTIQAKKEVEQRRAGGYSRKYASKAKNLADDMVRNTARDLLYYAVTQDAMLIFENLSRGFGRQGKRTFMAERQYTRMEDWLTAKLAYEGLPSKTYLSKTLAQYTSKTCSNCGFTITSADYDRVLEKLKKTATGWMTTINGKELKVEGQITYYNRYKRQNVVKDLSVELDRLSEESVNNDISSWTKGRSGEALSLLKKRFSHRPVQEKFVCLNCGFETHADEQAALNIARSWLFLRSQEYKKYQTNKTTGNTDKRAFVETWQSFYRKKLKEVWKPAV

SEQ ID NO: 321 - protein, 978 aa, synthetic construct
QEIKRINKIRRRLVKDSNTKKAGKTGPMKTLLVRVMTPDLRERLENLRKKPENIPQPISNTSRANLNKLLTDYTEMKKAILHVYWEEFQKDPVGLMSRVAQPASKKIDQNKLKPEMDEKGNLTTAGFACSQCGQPLFVYKLEQVSEKGKAYTNYFGRCNVAEHEKLILLAQLKPEKDSDEAVTYSLGKFGQRALDFYSIHVTKESTHPVKPLAQIAGNRYASGPVGKALSDACMGTIASFLSKYQDIIIEHQKVVKGNQKRLESLRELAGKENLEYPSVTLPPQPHTKEGVDAYNEVIARVRMWVNLNLWQKLKLSRDDAKPLLRLKGFPSFPLVERQANEVDWWDMVCNVKKLINEKKEDGKVFWQNLAGYKRQEALRPYLSSEEDRKKGKKFARYQLGDLLLHLEKKHGEDWGKVYDEAWERIDKKVEGLSKHIKLEEERRSEDAQSKAALTDWLRAKASFVIEGLKEADKDEFKRCELKLQKWYGDLRGKPFAIEAENSILDISGFSKQYNCAFIWQKDGVKKLNLYLIINYFKGGKLRFKKIKPEAFEANRFYTVINKKSGEIVPMEVNFNFDDPNLIILPLAFGKRQGREFIWNDLLSLETGSLKLANGRVIEKTLYNRRTRQDEPALFVALTFERREVLDSSNIKPMNLIGVDRGENIPAVIALTDPEGCPLSRFKDSLGNPTHILRIGESYKEKQRTIQAKKEVEQRRAGGYSRKYASKAKNLADDMVRNTARDLLYYAVTQDAMLIFENLSRGFGRQGKRTFMAERQYTRMEDWLTAKLAYEGLPSKTYLSKTLAQYTSKTCSNCGFTITSADYDRVLEKLKKTATGWMTTINGKELKVEGQITYYNRYKRQNVVKDLSVELDRLSEESVNNDISSWTKGRSGEALSLLKKRFSHRPVQEKFVCLNCGFETHADEQAALNIARSWLFLRSQEYKKYQTNKTTGNTDKRAFVETWQSFYRKKLKEVWKPAV

SEQ ID NO: 322 - protein, 978 aa, synthetic construct
QEIKRINKIRRRLVKDSNTKKAGKTGPMKTLLVRVMTPDLRERLENLRKKPENIPQPISNTSRANLNKLLTDYTEMKKAILHVYWEEFQKDPVGLMSRVAQPASKKIDQNKLKPEMDEKGNLTTAGFACSQCGQPLFVYKLEQVSEKGKAYTNYFGRCNVAEHEKLILLAQLKPEKDSDEAVTYSLGKFGQRALDFYSIHVTKESTHPVKPLAQIAGNRYASGPVGKALSDACMGTIASFLSKYQDIIIEHQKVVKGNQKRLESLRELAGKENLEYPSVTLPPQPHTKEGVDAYNEVIARVRMWVNLNLWQKLKLSRDDAKPLLRLKGFPSFPLVERQANEVDWWDMVCNVKKLINEKKEDGKVFWQNLAGYKRQEALRPYLSSEEDRKKGKKFARYQLGDLLLHLEKKHGEDWGKVYDEAWERIDKKVEGLSKHIKLEEERRSEDAQSKAALTDWLRAKASFVIEGLKEADKDEFCRCELKLQKWYGDLRGKPFAIEAENSILDISGFSKQYNCAFIWQKDGVKKLNLYLIINYFKGGKLRFKKIKPEAFEANRFYTVINKKSGEIVPMEVNFNFDDPNLIILPLAFGKRQGREFIWNDLLSLETGSLKLANGRVIEKTLYNRRTRQDEPALFVALTFERREVLDSSNIKPMNLIGVDRGENIPAVIALTDPEGCPLSRFKDSLGNPTHILRIGERYKEKQRTIQAKKEVEQRRAGGYSRKYASKAKNLADDMVRNTARDLLYYAVTQDAMLIFENLSRGFGRQGKRTFMAERQYTRMEDWLTAKLAYEGLPSKTYLSKTLAQYTSKTCSNCGFTITSADYDRVLEKLKKTATGWMTTINGKELKVEGQITYYNRYKRQNVVKDLSVELDRLSEESVNNDISSWTKGRSGEALSLLKKRFSHRPVQEKFVCLNCGFETHADEQAALNIARSWLFLRSQEYKKYQTNKTTGNTDKRAFVETWQSFYRKKLKEVWKPAV

SEQ ID NO: 323 - protein, 978 aa, synthetic construct
QEIKRINKIRRRLVKDSNTKKAGKTGPMKTLLVRVMTPDLRERLENLRKKPENIPQPISNTSRANLNKLLTDYTEMKKAILHVYWEEFQKDPVGLMSRVAQPASKKIDQNKLKPEMDEKGNLTTAGFACSQCGQPLFVYKLEQVSEKGKAYTNYFGRCNVAEHEKLILLAQLKPEKDSDEAVTYSLGKFGQRALDFYSIHVTKESTHPVKPLAQIAGNRYASGPVGKALSDACMGTIASFLSKYQDIIIEHQKVVKGNQKRLESLRELAGKENLEYPSVTLPPQPHTKEGVDAYNEVIARVRMWVNLNLWQKLKLSRDDAKPLLRLKGFPSFPLVERQANEVDWWDMVCNVKKLINEKKEDGKVFWQNLAGYKRQEALRPYLSSEEDRKKGKKFARYQLGDLLLHLEKKHGEDWGKVYDEAWERIDKKVEGLSKHIKLEEERRSEDAQSKAALTDWLRAKASFVIEGLKEADKDEFCRCELKLQKWYGDLRGKPFAIEAENSILDISGFSKQYNCAFIWQKDGVKKLNLYLIINYFKGGKLRFKKIKPEAFEANRFYTVINKKSGEIVPMEVNFNFDDPNLIILPLAFGKRQGREFIWNDLLSLETGSLKLANGRVIEKTLYNRRTRQDEPALFVALTFERREVLDSSNIKPMNLIGVDRGENIPAVIALTDPEGCPLSRFKDSLGNPTHILRIGEKYKEKQRTIQAKKEVEQRRAGGYSRKYASKAKNLADDMVRNTARDLLYYAVTQDAMLIFENLSRGFGRQGKRTFMAERQYTRMEDWLTAKLAYEGLPSKTYLSKTLAQYTSKTCSNCGFTITSADYDRVLEKLKKTATGWMTTINGKELKVEGQITYYNRYKRQNVVKDLSVELDRLSEESVNNDISSWTKGRSGEALSLLKKRFSHRPVQEKFVCLNCGFETHADEQAALNIARSWLFLRSQEYKKYQTNKTTGNTDKRAFVETWQSFYRKKLKEVWKPAV

SEQ ID NO: 324 - protein, 977 aa, synthetic construct
QEIKRINKIRRRLVKDSNTKKAGKTGPMKTLLVRVMTPDLRERLENLRKKPENIPQPISNTSRANLNKLLTDYTEMKKAILHVYWEEFQKDPVGLMSRVAQPASKKIDQNKLKPEMDEKGNLTTAGFACSQCGQPLFVYKLEQVSEKGKAYTNYFGRCNVAEHEKLILLAQLKPEKDSDEAVTYSLGKFGQRALDFYSIHVTKESTHPVKPLAQIAGNRYASGPVGKALSDACMGTIASFLSKYQDIIIEHQKVVKGNQKRLESLRELAGKENLEYPSVTLPPQPHTKEGVDAYNEVIARVRMWVNLNLWQKLKLSRDDAKPLLRLKGFPSFPLVERQANEVDWWDMVCNVKKLINEKKEDGKVFWQNLAGYKRQEALRPYLSSEEDRKKGKKFARYQLGDLLLHLEKKHGEDWGKVYDEAWERIDKKVEGLSKHIKLEEERRSEDAQSKAALTDWLRAKASFVIEGLKEADKDEFCRCELKLQKWYGDLRGKPFAIEAENILDISGFSKQYNCAFIWQKDGVKKLNLYLIINYFKGGKLRFKKIKPEAFEANRFYTVINKKSGEIVPMEVNFNFDDPNLIILPLAFGKRQGREFIWNDLLSLETGSLKLANGRVIEKTLYNRRTRQDEPALFVALTFERREVLDSSNIKPMNLIGVDRGENIPAVIALTDPEGCPLSRFKDSLGNPTHILRIGESYKEKQRTIQAKKEVEQRRAGGYSRKYASKAKNLADDMVRNTARDLLYYAVTQDAMLIFENLSRGFGRQGKRTFMAERQYTRMEDWLTAKLAYEGLPSKTYLSKTLAQYTSKTCSNCGFTITSADYDRVLEKLKKTATGWMTTINGKELKVEGQITYYNRYKRQNVVKDLSVELDRLSEESVNNDISSWTKGRSGEALSLLKKRFSHRPVQEKFVCLNCGFETHADEQAALNIARSWLFLRSQEYKKYQTNKTTGNTDKRAFVETWQSFYRKKLKEVWKPAV

SEQ ID NO: 325 - protein, 977 aa, synthetic construct
QEIKRINKIRRRLVKDSNTKKAGKTGPMKTLLVRVMTPDLRERLENLRKKPENIPQPISNTSRANLNKLLTDYTEMKKAILHVYWEEFQKDPVGLMSRVAQPASKKIDQNKLKPEMDEKGNLTTAGFACSQCGQPLFVYKLEQVSEKGKAYTNYFGRCNVAEHEKLILLAQLKPEKDSDEAVTYSLGKFGQRALDFYSIHVTKESTHPVKPLAQIAGNRYASGPVGKALSDACMGTIASFLSKYQDIIIEHQKVVKGNQKRLESLRELAGKENLEYPSVTLPPQPHTKEGVDAYNEVIARVRMWVNLNLWQKLKLSRDDAKPLLRLKGFPSFPLVERQANEVDWWDMVCNVKKLINEKKEDGKVFWQNLAGYKRQEALRPYLSSEEDRKKGKKFARYQLGDLLLHLEKKHGEDWGKVYDEAWERIDKKVEGLSKHIKLEEERRSEDAQSKAALTDWLRAKASFVIEGLKEADKDEFCRCELKLQKWYGDLRGKPFAIEAENSIDISGFSKQYNCAFIWQKDGVKKLNLYLIINYFKGGKLRFKKIKPEAFEANRFYTVINKKSGEIVPMEVNFNFDDPNLIILPLAFGKRQGREFIWNDLLSLETGSLKLANGRVIEKTLYNRRTRQDEPALFVALTFERREVLDSSNIKPMNLIGVDRGENIPAVIALTDPEGCPLSRFKDSLGNPTHILRIGESYKEKQRTIQAKKEVEQRRAGGYSRKYASKAKNLADDMVRNTARDLLYYAVTQDAMLIFENLSRGFGRQGKRTFMAERQYTRMEDWLTAKLAYEGLPSKTYLSKTLAQYTSKTCSNCGFTITSADYDRVLEKLKKTATGWMTTINGKELKVEGQITYYNRYKRQNVVKDLSVELDRLSEESVNNDISSWTKGRSGEALSLLKKRFSHRPVQEKFVCLNCGFETHADEQAALNIARSWLFLRSQEYKKYQTNKTTGNTDKRAFVETWQSFYRKKLKEVWKPAV

SEQ ID NO: 326 - protein, 978 aa, synthetic construct
QEIKRINKIRRRLVKDSNTKKAGKTGPMKTLLVRVMTPDLRERLENLRKKPENIPQPISNTSRANLNKLLTDYTEMKKAILHVYWEEFQKDPVGLMSRVAQPASKKIDQNKLKPEMDEKGNLTTAGFACSQCGQPLFVYKLEQVSEKGKAYTNYFGRCNVAEHEKLILLAQLKPEKDSDEAVTYSLGKFGQRALDFYSIHVTKESTHPVKPLAQIAGNRYASGPVGKALSDACMGTIASFLSKYQDIIIEHQKVVKGNQKRLESLRELAGKENLEYPSVTLPPQPHTKEGVDAYNEVIARVRMWVNLNLWQKLKLSRDDAKPLLRLKGFPSFPLVERQANEVDWWDMVCNVKKLINEKKEDGKVFWQNLAGYKRQEALRPYLSSEEDRKKGKKFARYQLGDLLLHLEKKHGEDWGKVYDEAWERIDKKVEGLSKHIKLEEERRSEDAQSKAALTDWLRAKASFVIEGLKEADKDEFCRCELKLQKWYGDLRGKPFAIEAENSRLDISGFSKQYNCAFIWQKDGVKKLNLYLIINYFKGGKLRFKKIKPEAFEANRFYTVINKKSGEIVPMEVNFNFDDPNLIILPLAFGKRQGREFIWNDLLSLETGSLKLANGRVIEKTLYNRRTRQDEPALFVALTFERREVLDSSNIKPMNLIGVDRGENIPAVIALTDPEGCPLSRFKDSLGNPTHILRIGESYKEKQRTIQAKKEVEQRRAGGYSRKYASKAKNLADDMVRNTARDLLYYAVTQDAMLIFENLSRGFGRQGKRTFMAERQYTRMEDWLTAKLAYEGLPSKTYLSKTLAQYTSKTCSNCGFTITSADYDRVLEKLKKTATGWMTTINGKELKVEGQITYYNRYKRQNVVKDLSVELDRLSEESVNNDISSWTKGRSGEALSLLKKRFSHRPVQEKFVCLNCGFETHADEQAALNIARSWLFLRSQEYKKYQTNKTTGNTDKRAFVETWQSFYRKKLKEVWKPAV

SEQ ID NO: 327 - protein, 978 aa, synthetic construct
QEIKRINKIRRRLVKDSNTKKAGKTGPMKTLLVRVMTPDLRERLENLRKKPENIPQPISNTSRANLNKLLTDYTEMKKAILHVYWEEFQKDPVGLMSRVAQPASKKIDQNKLKPEMDEKGNLTTAGFACSQCGQPLFVYKLEQVSEKGKAYTNYFGRCNVAEHEKLILLAQLKPEKDSDEAVTYSLGKFGQRALDFYSIHVTKESTHPVKPLAQIAGNRYASGPVGKALSDACMGTIASFLSKYQDIIIEHQKVVKGNQKRLESLRELAGKENLEYPSVTLPPQPHTKEGVDAYNEVIARVRMWVNLNLWQKLKLSRDDAKPLLRLKGFPSFPLVERQANEVDWWDMVCNVKKLINEKKEDGKVFWQNLAGYKRQEALRPYLSSEEDRKKGKKFARYQLGDLLLHLEKKHGEDWGKVYDEAWERIDKKVEGLSKHIKLEEERRSEDAQSKAALTDWLRAKASFVIEGLKEADKDEFCRCELKLQKWYGDLRGKPFAIEAENSKLDISGFSKQYNCAFIWQKDGVKKLNLYLIINYFKGGKLRFKKIKPEAFEANRFYTVINKKSGEIVPMEVNFNFDDPNLIILPLAFGKRQGREFIWNDLLSLETGSLKLANGRVIEKTLYNRRTRQDEPALFVALTFERREVLDSSNIKPMNLIGVDRGENIPAVIALTDPEGCPLSRFKDSLGNPTHILRIGESYKEKQRTIQAKKEVEQRRAGGYSRKYASKAKNLADDMVRNTARDLLYYAVTQDAMLIFENLSRGFGRQGKRTFMAERQYTRMEDWLTAKLAYEGLPSKTYLSKTLAQYTSKTCSNCGFTITSADYDRVLEKLKKTATGWMTTINGKELKVEGQITYYNRYKRQNVVKDLSVELDRLSEESVNNDISSWTKGRSGEALSLLKKRFSHRPVQEKFVCLNCGFETHADEQAALNIARSWLFLRSQEYKKYQTNKTTGNTDKRAFVETWQSFYRKKLKEVWKPAV

SEQ ID NO: 328 - protein, 978 aa, synthetic construct
QEIKRINKIRRRLVKDSNTKKAGKTGPMKTLLVRVMTPDLRERLENLRKKPENIPQPISNTSRANLNKLLTDYTEMKKAILHVYWEEFQKDPVGLMSRVAQPASKKIDQNKLKPEMDEKGNLTTAGFACSQCGQPLFVYKLEQVSEKGKAYTNYFGRCNVAEHEKLILLAQLKPEKDSDEAVTYSLGKFGQRALDFYSIHVTKESTHPVKPLAQIAGNRYASGPVGKALSDACMGTIASFLSKYQDIIIEHQKVVKGNQKRLESLRELAGKENLEYPSVTLPPQPHTKEGVDAYNEVIARVRMWVNLNLWQKLKLSRDDAKPLLRLKGFPSFPLVERQANEVDWWDMVCNVKKLINEKKEDGKVFWQNLAGYKRQEALRPYLSSEEDRKKGKKFARYQLGDLLLHLEKKHGEDWGKVYDEAWERIDKKVEGLSKHIKLEEERRSEDAQSKAALTDWLRAKASFVIEGLKEADKDEFCRCELKLQKWYGDLRGKPFAIEAENSILDISGFSKQYNCAFIWQKDGVKKLNLYLIINYFKGGKLRFKKIKPEAFEANRFYTVINKKSGEIVPMEVNFNFDDPNLIILPLAFGKRQGREFIWNDLLSLETGSLQLANGRVIEKTLYNRRTRQDEPALFVALTFERREVLDSSNIKPMNLIGVDRGENIPAVIALTDPEGCPLSRFKDSLGNPTHILRIGESYKEKQRTIQAKKEVEQRRAGGYSRKYASKAKNLADDMVRNTARDLLYYAVTQDAMLIFENLSRGFGRQGKRTFMAERQYTRMEDWLTAKLAYEGLPSKTYLSKTLAQYTSKTCSNCGFTITSADYDRVLEKLKKTATGWMTTINGKELKVEGQITYYNRYKRQNVVKDLSVELDRLSEESVNNDISSWTKGRSGEALSLLKKRFSHRPVQEKFVCLNCGFETHADEQAALNIARSWLFLRSQEYKKYQTNKTTGNTDKRAFVETWQSFYRKKLKEVWKPAV

SEQ ID NO: 329 - protein, 978 aa, synthetic construct
QEIKRINKIRRRLVKDSNTKKAGKTGPMKTLLVRVMTPDLRERLENLRKKPENIPQPISNTSRANLNKLLTDYTEMKKAILHVYWEEFQKDPVGLMSRVAQPASKKIDQNKLKPEMDEKGNLTTAGFACSQCGQPLFVYKLEQVSEKGKAYTNYFGRCNVAEHEKLILLAQLKPEKDSDEAVTYSLGKFGQRALDFYSIHVTKESTHPVKPLAQIAGNRYASGPVGKALSDACMGTIASFLSKYQDIIIEHQKVVKGNQKRLESLRELAGKENLEYPSVTLPPQPHTKEGVDAYNEVIARVRMWVNLNLWQKLKLSRDDAKPLLRLKGFPSFPLVERQANEVDWWDMVCNVKKLINEKKEDGKVFWQNLAGYKRQEALRPYLSSEEDRKKGKKFARYQLGDLLLHLEKKHGEDWGKVYDEAWERIDKKVEGLSKHIKLEEERRSEDAQSKAALTDWLRAKASFVIEGLKEADKDEFCRCELKLQKWYGDLRGKPFAIEAENSILDISGFSKQYNCAFIWQKDGVKKLNLYLIINYFKGGKLRFKKIKPEAFEANRFYTVINKKSGEIVPMEVNFNFDDPNLIILPLAFGKRQGREFIWNDLLSLETGSLKLANGQVIEKTLYNRRTRQDEPALFVALTFERREVLDSSNIKPMNLIGVDRGENIPAVIALTDPEGCPLSRFKDSLGNPTHILRIGESYKEKQRTIQAKKEVEQRRAGGYSRKYASKAKNLADDMVRNTARDLLYYAVTQDAMLIFENLSRGFGRQGKRTFMAERQYTRMEDWLTAKLAYEGLPSKTYLSKTLAQYTSKTCSNCGFTITSADYDRVLEKLKKTATGWMTTINGKELKVEGQITYYNRYKRQNVVKDLSVELDRLSEESVNNDISSWTKGRSGEALSLLKKRFSHRPVQEKFVCLNCGFETHADEQAALNIARSWLFLRSQEYKKYQTNKTTGNTDKRAFVETWQSFYRKKLKEVWKPAV

SEQ ID NO: 330 - protein, 978 aa, synthetic construct
QEIKRINKIRRRLVKDSNTKKAGKTGPMKTLLVRVMTPDLRERLENLRKKPENIPQPISNTSRANLNKLLTDYTEMKKAILHVYWEEFQKDPVGLMSRVAQPASKKIDQNKLKPEMDEKGNLTTAGFACSQCGQPLFVYKLEQVSEKGKATTNYFGRCNVAEHEKLILLAQLKPEKDSDEAVTYSLGKFGQRALDFYSIHVTKESTHPVKPLAQIAGNRYASGPVGKALSDACMGTIASFLSKYQDIIIEHQKVVKGNQKRLESLRELAGKENLEYPSVTLPPQPHTKEGVDAYNEVIARVRMWVNLNLWQKLKLSRDDAKPLLRLKGFPSFPLVERQANEVDWWDMVCNVKKLINEKKEDGKVFWQNLAGYKRQEALRPYLSSEEDRKKGKKFARYQLGDLLLHLEKKHGEDWGKVYDEAWERIDKKVEGLSKHIKLEEERRSEDAQSKAALTDWLRAKASFVIEGLKEADKDEFCRCELKLQKWYGDLRGKPFAIEAENSILDISGFSKQYNCAFIWQKDGVKKLNLYLIINYFKGGKLRFKKIKPEAFEANRFYTVINKKSGEIVPMEVNFNFDDPNLIILPLAFGKRQGREFIWNDLLSLETGSLKLANGRVIEKTLYNRRTRQDEPALFVALTFERREVLDSSNIKPMNLIGVDRGENIPAVIALTDPEGCPLSRFKDSLGNPTHILRIGESYKEKQRTIQAKKEVEQRRAGGYSRKYASKAKNLADDMVRNTARDLLYYAVTQDAMLIFENLSRGFGRQGKRTFMAERQYTRMEDWLTAKLAYEGLPSKTYLSKTLAQYTSKTCSNCGFTITSADYDRVLEKLKKTATGWMTTINGKELKVEGQITYYNRYKRQNVVKDLSVELDRLSEESVNNDISSWTKGRSGEALSLLKKRFSHRPVQEKFVCLNCGFETHADEQAALNIARSWLFLRSQEYKKYQTNKTTGNTDKRAFVETWQSFYRKKLKEVWKPAV

SEQ ID NO: 331 - protein, 978 aa, synthetic construct
QEIKRINKIRRRLVKDSNTKKAGKTGPMKTLLVRVMTPDLRERLENLRKKPENIPQPISNTSRANLNKLLTDYTEMKKAILHVYWEEFQKDPVGLMSRVAQPASKKIDQNKLKPEMDEKGNLTTAGFACSQCGQPLFVYKLEQVSEKGKAYTNYFGRCNVAEHEKLILLAQLKPEKDSDEAVTYSLGQFGQRALDFYSIHVTKESTHPVKPLAQIAGNRYASGPVGKALSDACMGTIASFLSKYQDIIIEHQKVVKGNQKRLESLRELAGKENLEYPSVTLPPQPHTKEGVDAYNEVIARVRMWVNLNLWQKLKLSRDDAKPLLRLKGFPSFPLVERQANEVDWWDMVCNVKKLINEKKEDGKVFWQNLAGYKRQEALRPYLSSEEDRKKGKKFARYQLGDLLLHLEKKHGEDWGKVYDEAWERIDKKVEGLSKHIKLEEERRSEDAQSKAALTDWLRAKASFVIEGLKEADKDEFCRCELKLQKWYGDLRGKPFAIEAENSILDISGFSKQYNCAFIWQKDGVKKLNLYLIINYFKGGKLRFKKIKPEAFEANRFYTVINKKSGEIVPMEVNFNFDDPNLIILPLAFGKRQGREFIWNDLLSLETGSLKLANGRVIEKTLYNRRTRQDEPALFVALTFERREVLDSSNIKPMNLIGVDRGENIPAVIALTDPEGCPLSRFKDSLGNPTHILRIGESYKEKQRTIQAKKEVEQRRAGGYSRKYASKAKNLADDMVRNTARDLLYYAVTQDAMLIFENLSRGFGRQGKRTFMAERQYTRMEDWLTAKLAYEGLPSKTYLSKTLAQYTSKTCSNCGFTITSADYDRVLEKLKKTATGWMTTINGKELKVEGQITYYNRYKRQNVVKDLSVELDRLSEESVNNDISSWTKGRSGEALSLLKKRFSHRPVQEKFVCLNCGFETHADEQAALNIARSWLFLRSQEYKKYQTNKTTGNTDKRAFVETWQSFYRKKLKEVWKPAV

SEQ ID NO: 332 - protein, 978 aa, synthetic construct
QEIKRINKIRRRLVKDSNTKKAGKTGPMKTLLVRVMTPDLRERLENLRKKPENIPQPISNTSRANLNKLLTDYTEMKKAILHVYWEEFQKDPVGLMSRVAQPASKKIDQNKLKPEMDEKGNLTTAGFACSQCGQPLFVYKLEQVSEKGKAYTNYFGRCNVAEHEKLILLAQLKPEKDSDEAVTYSLGKFQQRALDFYSIHVTKESTHPVKPLAQIAGNRYASGPVGKALSDACMGTIASFLSKYQDIIIEHQKVVKGNQKRLESLRELAGKENLEYPSVTLPPQPHTKEGVDAYNEVIARVRMWVNLNLWQKLKLSRDDAKPLLRLKGFPSFPLVERQANEVDWWDMVCNVKKLINEKKEDGKVFWQNLAGYKRQEALRPYLSSEEDRKKGKKFARYQLGDLLLHLEKKHGEDWGKVYDEAWERIDKKVEGLSKHIKLEEERRSEDAQSKAALTDWLRAKASFVIEGLKEADKDEFCRCELKLQKWYGDLRGKPFAIEAENSILDISGFSKQYNCAFIWQKDGVKKLNLYLIINYFKGGKLRFKKIKPEAFEANRFYTVINKKSGEIVPMEVNFNFDDPNLIILPLAFGKRQGREFIWNDLLSLETGSLKLANGRVIEKTLYNRRTRQDEPALFVALTFERREVLDSSNIKPMNLIGVDRGENIPAVIALTDPEGCPLSRFKDSLGNPTHILRIGESYKEKQRTIQAKKEVEQRRAGGYSRKYASKAKNLADDMVRNTARDLLYYAVTQDAMLIFENLSRGFGRQGKRTFMAERQYTRMEDWLTAKLAYEGLPSKTYLSKTLAQYTSKTCSNCGFTITSADYDRVLEKLKKTATGWMTTINGKELKVEGQITYYNRYKRQNVVKDLSVELDRLSEESVNNDISSWTKGRSGEALSLLKKRFSHRPVQEKFVCLNCGFETHADEQAALNIARSWLFLRSQEYKKYQTNKTTGNTDKRAFVETWQSFYRKKLKEVWKPAV

SEQ ID NO: 333 - protein, 978 aa, synthetic construct
QEIKPINKIRRRLVKDSNTKKAGKTGPMKTLLVRVMTPDLRERLENLRKKPENIPQPISNTSRANLNKLLTDYTEMKKAILHVYWEEFQKDPVGLMSRVAQPASKKIDQNKLKPEMDEKGNLTTAGFACSQCGQPLFVYKLEQVSEKGKAYTNYFGRCNVAEHEKLILLAQLKPEKDSDEAVTYSLGKFGQRALDFYSIHVTKESTHPVKPLAQIAGNRYASGPVGKALSDACMGTIASFLSKYQDIIIEHQKVVKGNQKRLESLRELAGKENLEYPSVTLPPQPHTKEGVDAYNEVIARVRMWVNLNLWQKLKLSRDDAKPLLRLKGFPSFPLVERQANEVDWWDMVCNVKKLINEKKEDGKVFWQNLAGYKRQEALRPYLSSEEDRKKGKKFARYQLGDLLLHLEKKHGEDWGKVYDEAWERIDKKVEGLSKHIKLEEERRSEDAQSKAALTDWLRAKASFVIEGLKEADKDEFCRCELKLQKWYGDLRGKPFAIEAENSILDISGFSKQYNCAFIWQKDGVKKLNLYLIINYFKGGKLRFKKIKPEAFEANRFYTVINKKSGEIVPMEVNFNFDDPNLIILPLAFGKRQGREFIWNDLLSLETGSLKLANGRVIEKTLYNRRTRQDEPALFVALTFERREVLDSSNIKPMNLIGVDRGENIPAVIALTDPEGCPLSRFKDSLGNPTHILRIGESYKEKQRTIQAKKEVEQRRAGGYSRKYASKAKNLADDMVRNTARDLLYYAVTQDAMLIFENLSRGFGRQGKRTFMAERQYTRMEDWLTAKLAYEGLPSKTYLSKTLAQYTSKTCSNCGFTITSADYDRVLEKLKKTATGWMTTINGKELKVEGQITYYNRYKRQNVVKDLSVELDRLSEESVNNDISSWTKGRSGEALSLLKKRFSHRPVQEKFVCLNCGFETHADEQAALNIARSWLFLRSQEYKKYQTNKTTGNTDKRAFVETWQSFYRKKLKEVWKPAV

SEQ ID NO: 334 - protein, 978 aa, synthetic construct
QEIWRINKIRRRLVKDSNTKKAGKTGPMKTLLVRVMTPDLRERLENLRKKPENIPQPISNTSRANLNKLLTDYTEMKKAILHVYWEEFQKDPVGLMSRVAQPASKKIDQNKLKPEMDEKGNLTTAGFACSQCGQPLFVYKLEQVSEKGKAYTNYFGRCNVAEHEKLILLAQLKPEKDSDEAVTYSLGKFGQRALDFYSIHVTKESTHPVKPLAQIAGNRYASGPVGKALSDACMGTIASFLSKYQDIIIEHQKVVKGNQKRLESLRELAGKENLEYPSVTLPPQPHTKEGVDAYNEVIARVRMWVNLNLWQKLKLSRDDAKPLLRLKGFPSFPLVERQANEVDWWDMVCNVKKLINEKKEDGKVFWQNLAGYKRQEALRPYLSSEEDRKKGKKFARYQLGDLLLHLEKKHGEDWGKVYDEAWERIDKKVEGLSKHIKLEEERRSEDAQSKAALTDWLRAKASFVIEGLKEADKDEFCRCELKLQKWYGDLRGKPFAIEAENSILDISGFSKQYNCAFIWQKDGVKKLNLYLIINYFKGGKLRFKKIKPEAFEANRFYTVINKKSGEIVPMEVNFNFDDPNLIILPLAFGKRQGREFIWNDLLSLETGSLKLANGRVIEKTLYNRRTRQDEPALFVALTFERREVLDSSNIKPMNLIGVDRGENIPAVIALTDPEGCPLSRFKDSLGNPTHILRIGESYKEKQRTIQAKKEVEQRRAGGYSRKYASKAKNLADDMVRNTARDLLYYAVTQDAMLIFENLSRGFGRQGKRTFMAERQYTRMEDWLTAKLAYEGLPSKTYLSKTLAQYTSKTCSNCGFTITSADYDRVLEKLKKTATGWMTTINGKELKVEGQITYYNRYKRQNVVKDLSVELDRLSEESVNNDISSWTKGRSGEALSLLKKRFSHRPVQEKFVCLNCGFETHADEQAALNIARSWLFLRSQEYKKYQTNKTTGNTDKRAFVETWQSFYRKKLKEVWKPAV

SEQ ID NO: 335 - protein, 979 aa, synthetic construct
QEIKRINKIRRRLVKDSNTKKAGKTGPMKTLLVRVMTPDLRERLENLRKKPENIPQPISNTSRANLNKLLTDYTEMKKAILHVYWEEFQKDPVGLMSRVAQPASKKIDQNKLKPEMDEKGNLTTAGFACSQCGQPLFVYKLEQVSEKGKAYTNYFGRCNVAEHEKLILLAQLKPEKDSDEAVTYSLGKFGQRALDFYSIHVTKESTHPVKPLAQIAGNRYASGPVGKALSDACMGTIASFLSKYQDIIIEHQKVVKGNQKRLESLRELAGKENLEYPSVTLPPQPHTKEGVDAYNEVIARVRMWVNLNLWQKLKLSRDDAKPLLRLKGFPSFPLVERQANEVDWWDMVCNVKKLINEKKEDGKVFWQNLAGYKRQEALRPYLSSEEDRKKGKKFARYQLGDLLLHLEKKHGEDWGKVYDEAWERIDKKVEGLSKHIKLEEERRSEDAQSKAALTDWLRAKASFVIEGLKEADKDEFCRCELKLQKWYGDLRGKPFAIEAENSILDISGFSKQYNCAFIWQKDGVKKLNLYLIINYFKGGKLRFKKIKPEAFEANRFYTVINKKSGEIVPMEVNFNFDDPNLIILPLAFGKRQGREFIWNDLLSLETGSLKLANGRVIEKTLYNRRTRQDEPALFVALTFERAREVLDSSNIKPMNLIGVDRGENIPAVIALTDPEGCPLSRFKDSLGNPTHILRIGESYKEKQRTIQAKKEVEQRRAGGYSRKYASKAKNLADDMVRNTARDLLYYAVTQDAMLIFENLSRGFGRQGKRTFMAERQYTRMEDWLTAKLAYEGLPSKTYLSKTLAQYTSKTCSNCGFTITSADYDRVLEKLKKTATGWMTTINGKELKVEGQITYYNRYKRQNVVKDLSVELDRLSEESVNNDISSWTKGRSGEALSLLKKRFSHRPVQEKFVCLNCGFETHADEQAALNIARSWLFLRSQEYKKYQTNKTTGNTDKRAFVETWQSFYRKKLKEVWKPAV

SEQ ID NO: 336 - protein, 978 aa, synthetic construct
QEIKRINKIRRRLVKDSNTKKAGKTGPMKTLLVRVMTPDLRERLENLRKKPENIPQPISNTSRANLNKLLTDYTEMKKAILHVYWEEFQKDPVGLMSRVAQPASKKIDQNKLKPEMDEKGNLTTAGFACSQCGQPLFVYKLEQVSEKGKAYTNYFGRCNVAEHEKLILLAQLKPEKDSDEAVTYSLGKFGQRALDFYSIHVTKESTHPVKPLAQIAGNRYASGPVGKALSDACMLTIASFLSKYQDIIIEHQKVVKGNQKRLESLRELAGKENLEYPSVTLPPQPHTKEGVDAYNEVIARVRMWVNLNLWQKLKLSRDDAKPLLRLKGFPSFPLVERQANEVDWWDMVCNVKKLINEKKEDGKVFWQNLAGYKRQEALRPYLSSEEDRKKGKKFARYQLGDLLLHLEKKHGEDWGKVYDEAWERIDKKVEGLSKHIKLEEERRSEDAQSKAALTDWLRAKASFVIEGLKEADKDEFCRCELKLQKWYGDLRGKPFAIEAENSILDISGFSKQYNCAFIWQKDGVKKLNLYLIINYFKGGKLRFKKIKPEAFEANRFYTVINKKSGEIVPMEVNFNFDDPNLIILPLAFGKRQGREFIWNDLLSLETGSLKLANGRVIEKTLYNRRTRQDEPALFVALTFERREVLDSSNIKPMNLIGVDRGENIPAVIALTDPEGCPLSRFKDSLGNPTHILRIGESYKEKQRTIQAKKEVEQRRAGGYSRKYASKAKNLADDMVRNTARDLLYYAVTQDAMLIFENLSRGFGRQGKRTFMAERQYTRMEDWLTAKLAYEGLPSKTYLSKTLAQYTSKTCSNCGFTITSADYDRVLEKLKKTATGWMTTINGKELKVEGQITYYNRYKRQNVVKDLSVELDRLSEESVNNDISSWTKGRSGEALSLLKKRFSHRPVQEKFVCLNCGFETHADEQAALNIARSWLFLRSQEYKKYQTNKTTGNTDKRAFVETWQSFYRKKLKEVWKPAV

SEQ ID NO: 337 - protein, 978 aa, synthetic construct
QEIKRINKIRRRLVKDSNTKKAGKTGPMKTLLVRVMTPDLRERLENLRKKPENIPQPISNTSRANLNKLLTDYTEMKKAILHVYWEEFQKDPVGLMSRVAQPASKKIDQNKLKPEMDEKGNLTTAGFACSQCGQPLFVYKLEQVSEKGKAYTNYFGRCNVAEHEKLILLAQLKPEKDSDEAVTYSLGKFGQRALDFYSIHVTKESTHPVKPLAQIAGNRYASGPVGKALSDACMHTIASFLSKYQDIIIEHQKVVKGNQKRLESLRELAGKENLEYPSVTLPPQPHTKEGVDAYNEVIARVRMWVNLNLWQKLKLSRDDAKPLLRLKGFPSFPLVERQANEVDWWDMVCNVKKLINEKKEDGKVFWQNLAGYKRQEALRPYLSSEEDRKKGKKFARYQLGDLLLHLEKKHGEDWGKVYDEAWERIDKKVEGLSKHIKLEEERRSEDAQSKAALTDWLRAKASFVIEGLKEADKDEFCRCELKLQKWYGDLRGKPFAIEAENSILDISGFSKQYNCAFIWQKDGVKKLNLYLIINYFKGGKLRFKKIKPEAFEANRFYTVINKKSGEIVPMEVNFNFDDPNLIILPLAFGKRQGREFIWNDLLSLETGSLKLANGRVIEKTLYNRRTRQDEPALFVALTFERREVLDSSNIKPMNLIGVDRGENIPAVIALTDPEGCPLSRFKDSLGNPTHILRIGESYKEKQRTIQAKKEVEQRRAGGYSRKYASKAKNLADDMVRNTARDLLYYAVTQDAMLIFENLSRGFGRQGKRTFMAERQYTRMEDWLTAKLAYEGLPSKTYLSKTLAQYTSKTCSNCGFTITSADYDRVLEKLKKTATGWMTTINGKELKVEGQITYYNRYKRQNVVKDLSVELDRLSEESVNNDISSWTKGRSGEALSLLKKRFSHRPVQEKFVCLNCGFETHADEQAALNIARSWLFLRSQEYKKYQTNKTTGNTDKRAFVETWQSFYRKKLKEVWKPAV

SEQ ID NO: 338 - protein, 978 aa, synthetic construct
QEIKRINKIRRRLVKDSNTKKAGKTGPMKTLLVRVMTPDLRERLENLRKKPENIPQPISNTSRANLNKLLTDYTEMKKAILHVYWEEFQKDPVGLMSRVAQPASKKIDQNKLKPEMDEKGNLTTAGFACSQCGQPLFVYKLEQVSEKGKAYTNYFGRCNVAEHEKLILLAQLKPEKDSDEAVTYSLGKFGQRALDFYSIHVTKESTHPVKPLAQIAGNRYASGPVGKALSDACMGTIASFLSKYQDIIIEHQKVVKGNQKRLESLRELAGKENLEYPSVTLPPQPHTKEGVDAYNEVIARVRMWVNLNLWQKLKLSRDDAKPLLRLKGFPSFPLVERQANEVDWWDMVCNVKKLINEKKEDGKVFWQNLAGYKRQEALRPYLSSEEDRKKGKKFARYQLGDLLLHLEKKHGEDWGKVYDEAWERIDKKVEGLSKHIKLEEERRSEDAQSKAALTDWLRAKASFVIEGLKEADKDEFCRCELKLQKWYGDLRGKPFAIEAENSILDISGFSKQYNCAFIWQKDGVKKLNLYLIINYFKGGKLRFKKIKPEAFEANRFYTVINKKSGEIVPMEVNFNFDDPNLIILPLAFGKRQGREFIWNDLLSLETGSLKLANGRVIEKTLYNRRTRQDEPALFVALTFERREVLDSSNIKPMNLIGVDRGENIPAVIALTDPEGCPLSRFKDSLGNPTHILRIGESYKEKQRTIQAKKEVEQRRAGGYSRKYASKAKNLADDMVRNTARDLLYYAVTQDAMLIFENLSRGFGRQGKRTFMAERQYTRMEDWLTAKLAYEGLPSKTYLSKTLAQYTSKTCSNCGFTITSADYDRVLEKLKKTATGWMTTINGKELKVEGQITYYNRYKRQNVVKDLSVELDRLSEESVNNDISSWTKGRSGEALSLLKKRFSHRPTQEKFVCLNCGFETHADEQAALNIARSWLFLRSQEYKKYQTNKTTGNTDKRAFVETWQSFYRKKLKEVWKPAV

SEQ ID NO: 339 - protein, 978 aa, synthetic construct
QEIKRINKIRRRLVKDSNTKKAGKTGPMKTLLVRVMTPDLRERLENLRKKPENIPQPISNTSRANLNKLLTDYTEMKKAILHVYWEEFQKDPVGLMSRVAQPASKKIDQNKLKPEMDEKGNLTTAGFACSQCGQPLFVYKLEQVSEKGKAYTNYFGRCNVAEHEKLILLAQLKPEKDSDEAVTYSLGKFGQRALDFYSIHVTKESTHPVKPLAQIAGNRYASGPVGKALSDACMGTIASFLSKYQDIIIEHQKVVKGNQKRLESLRELAGKENLEYPSVTLPPQPHTKEGVDAYNEVIARVRMWVNLNLWQKLKLSRDDAKPLLRLKGFPSFPLVERQANEVDWWDMVCNVKKLINEKKEDGKVFWQNLAGYKRQEALRPYLSSEEDRKKGKKFARYQLGDLLLHLEKKHGEDWGKVYDEAWERIDKKVEGLSKHIKLEEERRSEDAQSKAALTDWLRAKASFVIEGLKEADKDEFCRCELKLQKWYGDLRGKPFAIEAENSILDISGFSKQYNCAFIWQKDGVKKLNLYLIINYFKGGKLEFKKIKPEAFEANRFYTVINKKSGEIVPMEVNFNFDDPNLIILPLAFGKRQGREFIWNDLLSLETGSLKLANGRVIEKTLYNRRTRQDEPALFVALTFERREVLDSSNIKPMNLIGVDRGENIPAVIALTDPEGCPLSRFKDSLGNPTHILRIGESYKEKQRTIQAKKEVEQRRAGGYSRKYASKAKNLADDMVRNTARDLLYYAVTQDAMLIFENLSRGFGRQGKRTFMAERQYTRMEDWLTAKLAYEGLPSKTYLSKTLAQYTSKTCSNCGFTITSADYDRVLEKLKKTATGWMTTINGKELKVEGQITYYNRYKRQNVVKDLSVELDRLSEESVNNDISSWTKGRSGEALSLLKKRFSHRPVQEKFVCLNCGFETHADEQAALNIARSWLFLRSQEYKKYQTNKTTGNTDKRAFVETWQSFYRKKLKEVWKPAV

SEQ ID NO: 340 - protein, 977 aa, synthetic construct
QEIKRINKIRRRLVKDSNTKKAGKTGPMKTLLVRVMTPDLRERLENLRKKPENIPQPISNTSRANLNKLLTDYTEMKKAILHVYWEEFQKDPVGLMSRVAQPASKKIDQNKLKPEMDEKGNLTTAGFACSQCGQPLFVYKLEQVSEKGKAYTNYFGRCNVAEHEKLILLAQLKPEKDSDEAVTYSLGKFGQRALDFYSIHVTKESTHPVKPLAQIAGNRYASGPVGKALSDACMGTIASFLSKYQDIIIEHQKVVKGNQKRLESLRELAGKENLEYPSVTLPPQPHTKEGVDAYNEVIARVRMWVNLNLWQKLKLSRDDAKPLLRLKGFPSFPLVERQANEVDWWDMVCNVKKLINEKKEDGKVFWQNLAGYKRQEALRPYLSSEEDRKKGKKFARYQLGDLLLHLEKKHGEDWGKVYDEAWERIDKKVEGLSKHIKLEEERRSEDAQSKAALTDWLRAKASFVIEGLKEADKDEFCRCELKLQKWYGDLRGKPFAIEAENSILDISGFSKQYNCAFIWQKDGVKKLNLYLIINYFKGGKLRFKKIKPEAFEANRFYTVINKSGEIVPMEVNFNFDDPNLIILPLAFGKRQGREFIWNDLLSLETGSLKLANGRVIEKTLYNRRTRQDEPALFVALTFERREVLDSSNIKPMNLIGVDRGENIPAVIALTDPEGCPLSRFKDSLGNPTHILRIGESYKEKQRTIQAKKEVEQRRAGGYSRKYASKAKNLADDMVRNTARDLLYYAVTQDAMLIFENLSRGFGRQGKRTFMAERQYTRMEDWLTAKLAYEGLPSKTYLSKTLAQYTSKTCSNCGFTITSADYDRVLEKLKKTATGWMTTINGKELKVEGQITYYNRYKRQNVVKDLSVELDRLSEESVNNDISSWTKGRSGEALSLLKKRFSHRPVQEKFVCLNCGFETHADEQAALNIARSWLFLRSQEYKKYQTNKTTGNTDKRAFVETWQSFYRKKLKEVWKPAV

SEQ ID NO: 341 - protein, 979 aa, synthetic construct
QEIKRINKIRRRLVKDSNTKKAGKTGPMKTLLVRVMTPDLRERLENLRKKPENIPQPISNTSRANLNKLLTDYTEMKKAILHVYWEEFQKDPVGLMSRVAQPASKKIDQNKLKPEMDEKGNLTTAGFACSQCGQPLFVYKLEQVSEKGKAYTNYFGRCNVAEHEKLILLAQLKPEKDSDEAVTYSLGKFGQRALDFYSIHVTKESTHPVKPLAQIAGNRYASGPVGKALSDACMGTIASFLSKYQDIIIEHQKVVKGNQKRLESLRELAGKENLEYPSVTLPPQPHTKEGVDAYNEVIARVRMWVNLNLWQKLKLSRDDAKPLLRLKGFPSFPLVERQANEVDWWDMVCNVKKLINEKKEDGKVFWQNLAGYKRQEALRPYLSSEEDRKKGKKFARYQLGDLLLHLEKKHGEDWGKVYDEAWERIDKKVEGLSKHIKLEEERRSEDAQSKAALTDWLRAKASFVIEGLKEADKDEFCRCELKLQKWYGDLRGKPFAIEAENSILDISGFSKQYNCAFIWQKDGVKKLNLYLIINYFKGGKLRFKKIKPEAFEANRFYTVINKKSGEIVPMEVNFNFDDPNLIILPLAFGKRQAGREFIWNDLLSLETGSLKLANGRVIEKTLYNRRTRQDEPALFVALTFERREVLDSSNIKPMNLIGVDRGENIPAVIALTDPEGCPLSRFKDSLGNPTHILRIGESYKEKQRTIQAKKEVEQRRAGGYSRKYASKAKNLADDMVRNTARDLLYYAVTQDAMLIFENLSRGFGRQGKRTFMAERQYTRMEDWLTAKLAYEGLPSKTYLSKTLAQYTSKTCSNCGFTITSADYDRVLEKLKKTATGWMTTINGKELKVEGQITYYNRYKRQNVVKDLSVELDRLSEESVNNDISSWTKGRSGEALSLLKKRFSHRPVQEKFVCLNCGFETHADEQAALNIARSWLFLRSQEYKKYQTNKTTGNTDKRAFVETWQSFYRKKLKEVWKPAV

SEQ ID NO: 342 - protein, 979 aa, synthetic construct
QEIKRINKIRRRLVKDSNTKKAGKTGPMKTLLVRVMTPDLRERLENLRKKPENIPQPISNTSRANLNKLLTDYTEMKKAILHVYWEEFQKDPVGLMSRVAQPASKKIDQNKLKPEMDEKGNLTTAGFACSQCGQPLFVYKLEQVSEKGKAYTNYFGRCNVAEHEKLILLAQLKPEKDSDEAVTYSLGKFGQRALDFYSIHVTKESTHPVKPLAQIAGNRYASGPVGKALSDACMGTIASFLSKYQDIIIEHQKVVKGNQKRLESLRELAGKENLEYPSVTLPPQPHTKEGVDAYNEVIARVRMWVNLNLWQKLKLSRDDAKPLLRLKGFPSFPLVERQANEVDWWDMVCNVKKLINEKKEDGKVFWQNLAGYKRQEALRPYLSSEEDRKKGKKFARYQLGDLLLHLEKKHGEDWGKVYDEAWERIDKKVEGLSKHIKLEKEERRSEDAQSKAALTDWLRAKASFVIEGLKEADKDEFCRCELKLQKWYGDLRGKPFAIEAENSILDISGFSKQYNCAFIWQKDGVKKLNLYLIINYFKGGKLRFKKIKPEAFEANRFYTVINKKSGEIVPMEVNFNFDDPNLIILPLAFGKRQGREFIWNDLLSLETGSLKLANGRVIEKTLYNRRTRQDEPALFVALTFERREVLDSSNIKPMNLIGVDRGENIPAVIALTDPEGCPLSRFKDSLGNPTHILRIGESYKEKQRTIQAKKEVEQRRAGGYSRKYASKAKNLADDMVRNTARDLLYYAVTQDAMLIFENLSRGFGRQGKRTFMAERQYTRMEDWLTAKLAYEGLPSKTYLSKTLAQYTSKTCSNCGFTITSADYDRVLEKLKKTATGWMTTINGKELKVEGQITYYNRYKRQNVVKDLSVELDRLSEESVNNDISSWTKGRSGEALSLLKKRFSHRPVQEKFVCLNCGFETHADEQAALNIARSWLFLRSQEYKKYQTNKTTGNTDKRAFVETWQSFYRKKLKEVWKPAV

SEQ ID NO: 343 - protein, 54 aa, synthetic construct
EKRINKIRKKLSADNATKPVSRSGPMKTLLVRVMTDDLKKRLEKRRKKPEVMPQ

SEQ ID NO: 344 - protein, 44 aa, synthetic construct
VISNNAANNLRMLLDDYTKMKEAILQVYWQEFKDDHVGLMCKFA

SEQ ID NO: 345 - protein, 91 aa, synthetic construct
QPASKKIDQNKLKPEMDEKGNLTTAGFACSQCGQPLFVYKLEQVSEKGKAYTNYFGRCNVAEHEKLILLAQLKPEKDSDEAVTYSLGKFGQ

SEQ ID NO: 346 - protein, 141 aa, synthetic construct
RALDFYSIHVTKESTHPVKPLAQIAGNRYASGPVGKALSDACMGTIASFLSKYQDIIIEHQKVVKGNQKRLESLRELAGKENLEYPSVTLPPQPHTKEGVDAYNEVIARVRMWVNLNLWQKLKLSRDDAKPLLRLKGFPSF

SEQ ID NO: 347 - protein, 177 aa, synthetic construct
PVVERRENEVDWWNTINEVKKLIDAKRDMGRVFWSGVTAEKRNTILEGYNYLPNENDHKKREGSLENPKKPAKRQFGDLLLYLEKKYAGDWGKVFDEAWERIDKKIAGLTSHIEREEARNAEDAQSKAVLTDWLRAKASFVLERLKEMDEKEFYACEIQLQKWYGDLRGNPFAVEAE

SEQ ID NO: 348 - protein, 151 aa, synthetic construct
NRVVDISGFSIGSDGHSIQYRNLLAWKYLENGKREFYLLMNYGKKGRIRFTDGTDIKKSGKWQGLLYGGGKAKVIDLTFDPDDEQLIILPLAFGTRQGREFIWNDLLSLETGLIKLANGRVIEKTIYNKKIGRDEPALFVALTFERREVVD

SEQ ID NO: 349 - protein, 164 aa, synthetic construct
PSNIKPVNLIGVDRGENIPAVIALTDPEGCPLPEFKDSSGGPTDILRIGEGYKEKQRAIQAAKEVEQRRAGGYSRKFASKSRNLADDMVRNSARDLFYHAVTHDAVLVFENLSRGFGRQGKRTFMTERQYTKMEDWLTAKLAYEGLTSKTYLSKTLAQYTSKTC

SEQ ID NO: 350 - protein, 110 aa, synthetic construct
SNCGFTITTADYDGMLVRLKKTSDGWATTLNNKELKAEGQITYYNRYKRQTVEKELSAELDRLSEESGNNDISKWTKGRRDEALFLLKKRFSHRPVQEQFVCLDCGHEVH

SEQ ID NO: 351 - protein, 53 aa, synthetic construct
ADEQAALNIARSWLFLNSNSTEFKSYKSGKQPFVGAWQAFYKRRLKEVWKPNA

SEQ ID NO: 352 - protein, 56 aa, synthetic construct
QEIKRINKIRRRLVKDSNTKKAGKTGPMKTLLVRVMTPDLRERLENLRKKPENIPQ

SEQ ID NO: 353 - protein, 44 aa, synthetic construct
PISNTSRANLNKLLTDYTEMKKAILHVYWEEFQKDPVGLMSRVA

SEQ ID NO: 354 - protein, 90 aa, synthetic construct
QPAPKNIDQRKLIPVKDGNERLTSSGFACSQCCQPLYVYKLEQVNDKGKPHTNYFGRCNVSEHERLILLSPHKPEANDELVTYSLGKFGQ

SEQ ID NO: 355 - protein, 141 aa, synthetic construct
RALDFYSIHVTRESNHPVKPLEQIGGNSCASGPVGKALSDACMGAVASFLTKYQDIILEHQKVIKKNEKRLANLKDIASANGLAFPKITLPPQPHTKEGIEAYNNVVAQIVIWVNLNLWQKLKIGRDEAKPLQRLKGFPSF

SEQ ID NO: 356 - protein, 168 aa, synthetic construct
PLVERQANEVDWWDMVCNVKKLINEKKEDGKVFWQNLAGYKRQEALLPYLSSEEDRKKGKKFARYQFGDLLLHLEKKHGEDWGKVYDEAWERIDKKVEGLSKHIKLEEERRSEDAQSKAALTDWLRAKASFVIEGLKEADKDEFCRCELKLQKWYGDLRGKPFAIEAE

SEQ ID NO: 357 - protein, 146 aa, synthetic construct
NSILDISGFSKQYNCAFIWQKDGVKKLNLYLIINYFKGGKLRFKKIKPEAFEANRFYTVINKKSGEIVPMEVNFNFDDPNLIILPLAFGKRQGREFIWNDLLSLETGSLKLANGRVIEKTLYNRRTRQDEPALFVALTFERREVLD

SEQ ID NO: 358 - protein, 164 aa, synthetic construct
SSNIKPMNLIGIDRGENIPAVIALTDPEGCPLSRFKDSLGNPTHILRIGESYKEKQRTIQAAKEVEQRRAGGYSRKYASKAKNLADDMVRNTARDLLYYAVTQDAMLIFENLSRGFGRQGKRTFMAERQYTRMEDWLTAKLAYEGLPSKTYLSKTLAQYTSKTC

SEQ ID NO: 359 - protein, 110 aa, synthetic construct
SNCGFTITSADYDRVLEKLKKTATGWMTTINGKELKVEGQITYYNRYKRQNVVKDLSVELDRLSEESVNNDISSWTKGRSGEALSLLKKRFSHRPVQEKFVCLNCGFETH

SEQ ID NO: 360 - protein, 58 aa, synthetic construct
ADEQAALNIARSWLFLRSQEYKKYQTNKTTGNTDKRAFVETWQSFYRKKLKEVWKPAV

SEQ ID NO: 361 - protein, 7 aa, synthetic construct
PKKKRKV

SEQ ID NO: 362 - protein, 16 aa, synthetic construct
KRPAATKKAGQAKKKK

SEQ ID NO: 363 - protein, 9 aa, synthetic construct
PAAKRVKLD

SEQ ID NO: 364 - protein, 11 aa, synthetic construct
RQRRNELKRSP

SEQ ID NO: 365 - protein, 9 aa, synthetic construct
PKKKRKVSR

SEQ ID NO: 366 - protein, 39 aa, synthetic construct
PKKKRKVGGSPKKKRKVGGSPKKKRKVGGSPKKKRKVSR

SEQ ID NO: 367 - protein, 59 aa, synthetic construct
PKKKRKVGGSPKKKRKVGGSPKKKRKVGGSPKKKRKVGGSPKKKRKVGGSPKKKRKVSR

SEQ ID NO: 368 - protein, 11 aa, synthetic construct
PAAKRVKLDSR

SEQ ID NO: 369 - protein, 23 aa, synthetic construct
PAAKRVKLDGGSPAAKRVKLDSR

SEQ ID NO: 370 - protein, 47 aa, synthetic construct
PAAKRVKLDGGSPAAKRVKLDGGSPAAKRVKLDGGSPAAKRVKLDSR

SEQ ID NO: 371 - protein, 71 aa, synthetic construct
PAAKRVKLDGGSPAAKRVKLDGGSPAAKRVKLDGGSPAAKRVKLDGGSPAAKRVKLDGGSPAAKRVKLDSR

SEQ ID NO: 372 - protein, 18 aa, synthetic construct
KRPAATKKAGQAKKKKSR

SEQ ID NO: 373 - protein, 37 aa, synthetic construct
KRPAATKKAGQAKKKKGGSKRPAATKKAGQAKKKKSR

SEQ ID NO: 374 - protein, 21 aa, synthetic construct
PAAKRVKLDGGSPKKKRKVSR

SEQ ID NO: 375 - protein, 21 aa, synthetic construct
PAAKKKKLDGGSPKKKRKVSR

SEQ ID NO: 376 - protein, 11 aa, synthetic construct
PAAKKKKLDSR

SEQ ID NO: 377 - protein, 35 aa, synthetic construct
PAAKKKKLDGGSPAAKKKKLDGGSPAAKKKKLDSR

SEQ ID NO: 378 - protein, 47 aa, synthetic construct
PAAKKKKLDGGSPAAKKKKLDGGSPAAKKKKLDGGSPAAKKKKLDSR

SEQ ID NO: 379 - protein, 13 aa, synthetic construct
PAKRARRGYKCSR

SEQ ID NO: 380 - protein, 26 aa, synthetic construct
PAKRARRGYKCGSPAKRARRGYKCSR

SEQ ID NO: 381 - protein, 9 aa, synthetic construct
PRRKREESR

SEQ ID NO: 382 - protein, 9 aa, synthetic construct
PYRGRKESR

SEQ ID NO: 383 - protein, 10 aa, synthetic construct
PLRKRPRRSR

SEQ ID NO: 384 - protein, 20 aa, synthetic construct
PLRKRPRRGSPLRKRPRRSR

SEQ ID NO: 385 - protein, 32 aa, synthetic construct
PAAKRVKLDGGKRTADGSEFESPKKKRKVGGS

SEQ ID NO: 386 - protein, 34 aa, synthetic construct
PAAKRVKLDGGKRTADGSEFESPKKKRKVPPPPG

SEQ ID NO: 387 - protein, 39 aa, synthetic construct
PAAKRVKLDGGKRTADGSEFESPKKKRKVGIHGVPAAPG

SEQ ID NO: 388 - protein, 39 aa, synthetic construct
PAAKRVKLDGGKRTADGSEFESPKKKRKVGGGSGGGSPG

SEQ ID NO: 389 - protein, 40 aa, synthetic construct
PAAKRVKLDGGKRTADGSEFESPKKKRKVPGGGSGGGSPG

SEQ ID NO: 390 - protein, 48 aa, synthetic construct
PAAKRVKLDGGKRTADGSEFESPKKKRKVAEAAAKEAAAKEAAAKAPG

SEQ ID NO: 391 - protein, 22 aa, synthetic construct
PAAKRVKLDGGSPKKKRKVGGS

SEQ ID NO: 392 - protein, 21 aa, synthetic construct
PAAKRVKLDPPPPKKKRKVPG

SEQ ID NO: 393 - protein, 11 aa, synthetic construct
PAAKRVKLDPG

SEQ ID NO: 394 - protein, 21 aa, synthetic construct
PAAKRVKLDGGGSGGGSGGGS

SEQ ID NO: 395 - protein, 12 aa, synthetic construct
PAAKRVKLDPPP

SEQ ID NO: 396 - protein, 24 aa, synthetic construct
PAAKRVKLDGGGSGGGSGGGSPPP

SEQ ID NO: 397 - protein, 10 aa, synthetic construct
PKKKRKVPPP

SEQ ID NO: 398 - protein, 10 aa, synthetic construct
PKKKRKVGGS

SEQ ID NO: 399 - protein, 39 aa, synthetic construct
GSPKKKRKVGGSPKKKRKVGGSPKKKRKVGGSPKKKRKV

SEQ ID NO: 400 - protein, 59 aa, synthetic construct
GSPKKKRKVGGSPKKKRKVGGSPKKKRKVGGSPKKKRKVGGSPKKKRKVGGSPKKKRKV

SEQ ID NO: 401 - protein, 23 aa, synthetic construct
GSPAAKRVKLDGGSPAAKRVKLD

SEQ ID NO: 402 - protein, 47 aa, synthetic construct
GSPAAKRVKLDGGSPAAKRVKLDGGSPAAKRVKLDGGSPAAKRVKLD

SEQ ID NO: 403 - protein, 18 aa, synthetic construct
GSKRPAATKKAGQAKKKK

SEQ ID NO: 404 - protein, 35 aa, synthetic construct
KRPAATKKAGQAKKKKGGSKRPAATKKAGQAKKKK

SEQ ID NO: 405 - protein, 15 aa, synthetic construct
GSKLGPRKATGRWGS

SEQ ID NO: 406 - protein, 19 aa, synthetic construct
GSKRKGSPERGERKRHWGS

SEQ ID NO: 407 - protein, 31 aa, synthetic construct
GSPKKKRKVGSGSKRPAATKKAGQAKKKKLE

SEQ ID NO: 408 - protein, 30 aa, synthetic construct
GPKRTADSQHSTPPKTKRKVEFEPKKKRKV

SEQ ID NO: 409 - protein, 36 aa, synthetic construct
GGGSGGGSKRTADSQHSTPPKTKRKVEFEPKKKRKV

SEQ ID NO: 410 - protein, 45 aa, synthetic construct
AEAAAKEAAAKEAAAKAKRTADSQHSTPPKTKRKVEFEPKKKRKV

SEQ ID NO: 411 - protein, 40 aa, synthetic construct
GPPKKKRKVGGSKRTADSQHSTPPKTKRKVEFEPKKKRKV

SEQ ID NO: 412 - protein, 28 aa, synthetic construct
GPAEAAAKEAAAKEAAAKAPAAKRVKLD

SEQ ID NO: 413 - protein, 23 aa, synthetic construct
GPGGGSGGGSGGGSPAAKRVKLD

SEQ ID NO: 414 - protein, 11 aa, synthetic construct
GPPAAKRVKLD

SEQ ID NO: 415 - protein, 19 aa, synthetic construct
VGSKRPAATKKAGQAKKKK

SEQ ID NO: 416 - protein, 44 aa, synthetic construct
TGGGPGGGAAAGSGSPKKKRKVGSGSKRPAATKKAGQAKKKKLE

SEQ ID NO: 417 - protein, 26 aa, synthetic construct
TGGGPGGGAAAGSGSPKKKRKVGSGS

SEQ ID NO: 418 - protein, 13 aa, synthetic construct
PPPPKKKRKVPPP

SEQ ID NO: 419 - protein, 13 aa, synthetic construct
GGSPKKKRKVPPP

SEQ ID NO: 420 - protein, 10 aa, synthetic construct
PPPPKKKRKV

SEQ ID NO: 421 - protein, 10 aa, synthetic construct
GGSPKKKRKV

SEQ ID NO: 422 - protein, 19 aa, synthetic construct
GGSPKKKRKVGGSGGSGGS

SEQ ID NO: 423 - protein, 20 aa, synthetic construct
GGSPKKKRKVGGSPKKKRKV

SEQ ID NO: 424 - protein, 26 aa, synthetic construct
GGSGGSGGSPKKKRKVGGSPKKKRKV

SEQ ID NO: 425 - protein, 22 aa, synthetic construct
VGGGSGGGSGGGSPAAKRVKLD

SEQ ID NO: 426 - protein, 13 aa, synthetic construct
VPPPPAAKRVKLD

SEQ ID NO: 427 - protein, 25 aa, synthetic construct
VPPPGGGSGGGSGGGSPAAKRVKLD

SEQ ID NO: 428 - protein, 12 aa, synthetic construct
VGSPAAKRVKLD

SEQ ID NO: 429 - protein, 5 aa, synthetic construct
  VARIANT 2..5: note = individual amino acid residues may be present or absent
GGGGG

SEQ ID NO: 430 - protein, 10 aa, synthetic construct
  VARIANT 3..4: note = grouped amino acid residues may be present or absent
  VARIANT 5..6: note = grouped amino acid residues may be present or absent
  VARIANT 7..8: note = grouped amino acid residues may be present or absent
  VARIANT 9..10: note = grouped amino acid residues may be present or absent
GSGSGSGSGS

SEQ ID NO: 431 - protein, 25 aa, synthetic construct
  VARIANT 6..10: note = grouped amino acid residues may be present or absent
  VARIANT 11..15: note = grouped amino acid residues may be present or absent
  VARIANT 16..20: note = grouped amino acid residues may be present or absent
  VARIANT 21..25: note = grouped amino acid residues may be present or absent
GSGGSGSGGSGSGGSGSGGSGSGGS

SEQ ID NO: 432 - protein, 30 aa, synthetic construct
  VARIANT 7..12: note = grouped amino acid residues may be present or absent
  VARIANT 13..18: note = grouped amino acid residues may be present or absent
  VARIANT 19..24: note = grouped amino acid residues may be present or absent
  VARIANT 25..30: note = grouped amino acid residues may be present or absent
GGSGGSGGSGGSGGSGGSGGSGGSGGSGGS

SEQ ID NO: 433 - protein, 20 aa, synthetic construct
  VARIANT 5..8: note = grouped amino acid residues may be present or absent
  VARIANT 9..12: note = grouped amino acid residues may be present or absent
  VARIANT 13..16: note = grouped amino acid residues may be present or absent
  VARIANT 17..20: note = grouped amino acid residues may be present or absent
GGGSGGGSGGGSGGGSGGGS

SEQ ID NO: 434 - protein, 4 aa, synthetic construct
GGSG

SEQ ID NO: 435 - protein, 5 aa, synthetic construct
GGSGG

SEQ ID NO: 436 - protein, 5 aa, synthetic construct
GSGSG

SEQ ID NO: 437 - protein, 5 aa, synthetic construct
GSGGG

SEQ ID NO: 438 - protein, 5 aa, synthetic construct
GGGSG

SEQ ID NO: 439 - protein, 5 aa, synthetic construct
GSSSG

SEQ ID NO: 440 - protein, 4 aa, synthetic construct
GPGP

SEQ ID NO: 441 - protein, 6 aa, synthetic construct
PPAPPA

SEQ ID NO: 442 - protein, 4 aa, synthetic construct
PPPG

SEQ ID NO: 443 - protein, 7 aa, synthetic construct
PPPGPPP

SEQ ID NO: 444 - protein, 23 aa, synthetic construct
  VARIANT 8..11: note = grouped amino acid residues may be present or absent
  VARIANT 12..15: note = grouped amino acid residues may be present or absent
  VARIANT 16..19: note = grouped amino acid residues may be present or absent
  VARIANT 20..23: note = grouped amino acid residues may be present or absent
PPPGGGSGGGSGGGSGGGSGGGS

SEQ ID NO: 445 - protein, 23 aa, synthetic construct
  VARIANT 1..4: note = grouped amino acid residues may be present or absent
  VARIANT 5..8: note = grouped amino acid residues may be present or absent
  VARIANT 9..12: note = grouped amino acid residues may be present or absent
  VARIANT 13..16: note = grouped amino acid residues may be present or absent
GGGSGGGSGGGSGGGSGGGSPPP

SEQ ID NO: 446 - protein, 17 aa, synthetic construct
AEAAAKEAAAKEAAAKA

SEQ ID NO: 447 - protein, 12 aa, synthetic construct
TPPKTKRKVEFE

SEQ ID NO: 448 - protein, 7 aa, synthetic construct
GGSGGGS

SEQ ID NO: 449 - protein, 7 aa, synthetic construct
GSGSGGG

SEQ ID NO: 450 - protein, 27 aa, synthetic construct
SSGNSNANSRGPSFSSGLVPLSLRGSH

SEQ ID NO: 451 - RNA, 108 nt, synthetic construct
  source 1..108: mol_type = other RNA
acatctggcgcgtttattccattactttggagccagtcccagcgactatgtcgtatggacgaagcgcttatttatcggagagaaaccgataagtaaaacgcatcaaag

SEQ ID NO: 452 - RNA, 108 nt, synthetic construct
  source 1..108: mol_type = other RNA
tactggcgcttttatctcattactttgagagccatcaccagcgactatgtcgtatgggtaaagcgcttatttatcggagagaaatccgataaataagaagcatcaaag

SEQ ID NO: 453 - RNA, 81 nt, synthetic construct
  source 1..81: mol_type = other RNA
acatctggcgcgtttattccattactttggagccagtcccagcgactatgtcgtatggacgaagcgcttatttatcggaga

SEQ ID NO: 454 - RNA, 78 nt, synthetic construct
  source 1..78: mol_type = other RNA
acatctggcgcgtttattccattactttggagccagtcccagcgactatgtcgtatggacgaagcgcttatttatcgg

SEQ ID NO: 455 - RNA, 80 nt, synthetic construct
  source 1..80: mol_type = other RNA
tactggcgcttttatctcattactttgagagccatcaccagcgactatgtcgtatgggtaaagcgcttatttatcggaga

SEQ ID NO: 456 - RNA, 77 nt, synthetic construct
  source 1..77: mol_type = other RNA
tactggcgcttttatctcattactttgagagccatcaccagcgactatgtcgtatgggtaaagcgcttatttatcgg

SEQ ID NO: 457 - RNA, 25 nt, synthetic construct
  source 1..25: mol_type = other RNA
gtttacacactccctctcatagggt

SEQ ID NO: 458 - RNA, 25 nt, synthetic construct
  source 1..25: mol_type = other RNA
gtttacacactccctctcatgaggt

SEQ ID NO: 459 - RNA, 25 nt, synthetic construct
  source 1..25: mol_type = other RNA
ttttacataccccctctcatgggat

SEQ ID NO: 460 - RNA, 25 nt, synthetic construct
  source 1..25: mol_type = other RNA
gtttacacactccctctcatggggg

SEQ ID NO: 461 - RNA, 20 nt, synthetic construct
  source 1..20: mol_type = other RNA
ccagcgactatgtcgtatgg

SEQ ID NO: 462 - RNA, 39 nt, synthetic construct
  source 1..39: mol_type = other RNA
gcgcttatttatcggagagaaatccgataaataagaagc

SEQ ID NO: 463 - RNA, 74 nt, synthetic construct
  source 1..74: mol_type = other RNA
ggcgcttttatctcattactttgagagccatcaccagcgactatgtcgtatgggtaaagcgcttatttatcgga

SEQ ID NO: 464 - RNA, 89 nt, synthetic construct
  source 1..89: mol_type = other RNA
actggcgcttttatctgattactttgagagccatcaccagcgactatgtcgtagtgggtaaagctccctcttcggagggagcatcaaag

SEQ ID NO: 465 - RNA, 99 nt, synthetic construct
  source 1..99: mol_type = other RNA
actggcgcttctatctgattactctgagcgccatcaccagcgactatgtcgtagtgggtaaagccgcttacggacttcggtccgtaagaggcatcagag

SEQ ID NO: 466 - RNA, 89 nt, synthetic construct
  source 1..89: mol_type = other RNA
actggcgcttctatctgattactctgagcgccatcaccagcgactatgtcgtagtgggtaaagctccctcttcggagggagcatcagag

SEQ ID NO: 467 - RNA, 97 nt, synthetic construct
  source 1..97: mol_type = other RNA
actggcgcctttatctcattactttgagagccatcaccagcgactatgtcgtatgggtaaagcgcttacggacttcggtccgtaagaagcatcaaag

SEQ ID NO: 468 - RNA, 89 nt, synthetic construct
  source 1..89: mol_type = other RNA
gctggcgcttttatctgattactttgagagccatcaccagcgactatgtcgtagtgggtaaagctccctcttcggagggagcatcaaag

SEQ ID NO: 469 - RNA, 88 nt, synthetic construct
  source 1..88: mol_type = other RNA
actggcgcttttatctgattactttgagagccatcaccagcgactatgtcgtatgggtaaagctccctcttcggagggagcatcaaag

SEQ ID NO: 470 - RNA, 151 nt, synthetic construct
  source 1..151: mol_type = other RNA
actggcgcttttatctgattactttgagagccatcaccagcgactatgtcgtagtgggtaaataggagctgcactatgggcgcagtgtcattgacgctgacggtacaggccagacaattattgtctggtatagtgcagctcctaatcaaag

SEQ ID NO: 471 - RNA, 97 nt, synthetic construct
  source 1..97: mol_type = other RNA
actggcgcctttatctgattactttgagagccatcaccagcgactatgtcgtatgggtaaagcgcttacggacttcggtccgtaagaagcatcaaag

SEQ ID NO: 472 - RNA, 97 nt, synthetic construct
  source 1..97: mol_type = other RNA
actggcgcttttatctgattactttgagagccatcaccagcgactatgtcgtatgggtaaagcgcttacggacttcggtccgtaagaagcatcaaag

SEQ ID NO: 473 - RNA, 98 nt, synthetic construct
  source 1..98: mol_type = other RNA
actggcgcttttatctgattactttgagagccatcaccagcgactatgtcgtagtgggtaaagcgcttacggacttcggtccgtaagaagcatcaaag

SEQ ID NO: 474 - RNA, 89 nt, synthetic construct
  source 1..89: mol_type = other RNA
actggcgcttttatctgattactttgagagccatcaccagcgactatgtcgtattgggtaaagctccctcttcggagggagcatcaaag

SEQ ID NO: 475 - RNA, 98 nt, synthetic construct
  source 1..98: mol_type = other RNA
actggcgcttttatctgattactttgagagccatcaccagcgactatgtcgtattgggtaaagcgcttacggacttcggtccgtaagaagcatcaaag

SEQ ID NO: 476 - RNA, 98 nt, synthetic construct
  source 1..98: mol_type = other RNA
actggcgcctttatcatcattactttgagagccatcaccagcgactatgtcgtatgggtaaagcgcttacggacttcggtccgtaagaagcatcaaag

SEQ ID NO: 477 - RNA, 90 nt, synthetic construct
  source 1..90: mol_type = other RNA
actggcgcttttatctgattactttgagagccatcaccagcgactatgtcgtagtgggtaaagcgccctcttcggagggaagcatcaaag

SEQ ID NO: 478 - RNA, 89 nt, synthetic construct
  source 1..89: mol_type = other RNA
actggcacttttacctgattactttgagagccaacaccagcgactatgtcgtagtgggtaaagctccctcttcggagggagcatcaaag

SEQ ID NO: 479 - RNA, 89 nt, synthetic construct
  source 1..89: mol_type = other RNA
actggcacttttatctgattactttgagagccatcaccagcgactatgtcgtagtgggtaaagctccctcttcggagggagcatcaaag

SEQ ID NO: 480 - RNA, 89 nt, synthetic construct
  source 1..89: mol_type = other RNA
actggcccttttatctgattactttgagagccatcaccagcgactatgtcgtagtgggtaaagctccctcttcggagggagcatcaaag

SEQ ID NO: 481 - RNA, 89 nt, synthetic construct
  source 1..89: mol_type = other RNA
actggcgcttttacctgattactttgagagccatcaccagcgactatgtcgtagtgggtaaagctccctcttcggagggagcatcaaag

SEQ ID NO: 482 - RNA, 89 nt, synthetic construct
  source 1..89: mol_type = other RNA
actggcgcttttatctgattactttgagagccaacaccagcgactatgtcgtagtgggtaaagctccctcttcggagggagcatcaaag

SEQ ID NO: 483 - RNA, 97 nt, synthetic construct
  source 1..97: mol_type = other RNA
actggcacctttacctgattactttgagagccaacaccagcgactatgtcgtatgggtaaagcgcttacggacttcggtccgtaagaagcatcaaag

SEQ ID NO: 484 - RNA, 97 nt, synthetic construct
  source 1..97: mol_type = other RNA
actggcacctttatctgattactttgagagccatcaccagcgactatgtcgtatgggtaaagcgcttacggacttcggtccgtaagaagcatcaaag

SEQ ID NO: 485 - RNA, 97 nt, synthetic construct
  source 1..97: mol_type = other RNA
actggcccctttatctgattactttgagagccatcaccagcgactatgtcgtatgggtaaagcgcttacggacttcggtccgtaagaagcatcaaag

SEQ ID NO: 486 - RNA, 97 nt, synthetic construct
  source 1..97: mol_type = other RNA
actggcgcctttatctgattactttgagagccaacaccagcgactatgtcgtatgggtaaagcgcttacggacttcggtccgtaagaagcatcaaag

SEQ ID NO: 487 - RNA, 90 nt, synthetic construct
  source 1..90: mol_type = other RNA
gactggcgcttttatctgattactttgagagccatcaccagcgactatgtcgtagtgggtaaagctccctcttcggagggagcatcaaag

SEQ ID NO: 488 - RNA, 90 nt, synthetic construct
  source 1..90: mol_type = other RNA
actggcgcctttatctgattactttggagagccatcaccagcgactatgtcgtagtgggtaaagctccctcttcggagggagcatcaaag

SEQ ID NO: 489 - RNA, 89 nt, synthetic construct
  source 1..89: mol_type = other RNA
actggcgcatttatctgattactttgtgagccatcaccagcgactatgtcgtagtgggtaaagctccctcttcggagggagcatcaaag

SEQ ID NO: 490 - RNA, 89 nt, synthetic construct
  source 1..89: mol_type = other RNA
actggcgcctttatctgattactttgagagccatcaccagcgactatgtcgtagtgggtaaagctccctcttcggagggagcatcaaag

SEQ ID NO: 491 - RNA, 90 nt, synthetic construct
  source 1..90: mol_type = other RNA
actggcgcttttatctgattactttggagagccatcaccagcgactatgtcgtagtgggtaaagctccctcttcggagggagcatcaaag

SEQ ID NO: 492 - RNA, 89 nt, synthetic construct
  source 1..89: mol_type = other RNA
actggcgcatttatctgattactttgagagccatcaccagcgactatgtcgtagtgggtaaagctccctcttcggagggagcatcaaag

SEQ ID NO: 493 - RNA, 89 nt, synthetic construct
  source 1..89: mol_type = other RNA
actggcgcttttatctgattactttgtgagccatcaccagcgactatgtcgtagtgggtaaagctccctcttcggagggagcatcaaag

SEQ ID NO: 494 - RNA, 90 nt, synthetic construct
  source 1..90: mol_type = other RNA
actggcgcttttattctgattactttgagagccatcaccagcgactatgtcgtagtgggtaaagctccctcttcggagggagcatcaaag

SEQ ID NO: 495 - RNA, 88 nt, synthetic construct
  source 1..88: mol_type = other RNA
acggcgcttttatctgattactttgagagccatcaccagcgactatgtcgtagtgggtaaagctccctcttcggagggagcatcaaag

SEQ ID NO: 496 - RNA, 89 nt, synthetic construct
  source 1..89: mol_type = other RNA
actggcgcttttatatgattactttgagagccatcaccagcgactatgtcgtagtgggtaaagctccctcttcggagggagcatcaaag

SEQ ID NO: 497 - RNA, 90 nt, synthetic construct
  source 1..90: mol_type = other RNA
actggcgcttttatcttgattactttgagagccatcaccagcgactatgtcgtagtgggtaaagctccctcttcggagggagcatcaaag

SEQ ID NO: 498 - RNA, 89 nt, synthetic construct
  source 1..89: mol_type = other RNA
actggcgcttttatctgattactttgagagccagcaccagcgactatgtcgtagtgggtaaagctccctcttcggagggagcatcaaag

SEQ ID NO: 499 - RNA, 89 nt, synthetic construct
  source 1..89: mol_type = other RNA
actggcgctgttatctgattacttcgagagccatcaccagcgactatgtcgtagtgggtaaagctccctcttcggagggagcatcgaag

SEQ ID NO: 500 - RNA, 89 nt, synthetic construct
  source 1..89: mol_type = other RNA
actggcgctcttatctgattacttcgagagccatcaccagcgactatgtcgtagtgggtaaagctccctcttcggagggagcatcgaag

SEQ ID NO: 501 - RNA, 89 nt, synthetic construct
  source 1..89: mol_type = other RNA
actggcgcttgtatctgattactctgagagccatcaccagcgactatgtcgtagtgggtaaagctccctcttcggagggagcatcagag

SEQ ID NO: 502 - RNA, 89 nt, synthetic construct
  source 1..89: mol_type = other RNA
actggcgcttctatctgattactctgagagccatcaccagcgactatgtcgtagtgggtaaagctccctcttcggagggagcatcagag

SEQ ID NO: 503 - RNA, 89 nt, synthetic construct
  source 1..89: mol_type = other RNA
actggcgctttgatctgattaccttgagagccatcaccagcgactatgtcgtagtgggtaaagctccctcttcggagggagcatcaagg

SEQ ID NO: 504 - RNA, 89 nt, synthetic construct
  source 1..89: mol_type = other RNA
actggcgctttcatctgattaccttgagagccatcaccagcgactatgtcgtagtgggtaaagctccctcttcggagggagcatcaagg

SEQ ID NO: 505 - RNA, 89 nt, synthetic construct
  source 1..89: mol_type = other RNA
actggcgctgttatctgattactttgagagccatcaccagcgactatgtcgtagtgggtaaagctccctcttcggagggagcatcaaag

SEQ ID NO: 506 - RNA, 89 nt, synthetic construct
  source 1..89: mol_type = other RNA
actggcgcttttatctgattactttgagagccatcaccagcgactatgtcgtagtgggtaaagctccctcttcggagggagcatcgaag

SEQ ID NO: 507 - RNA, 89 nt, synthetic construct
  source 1..89: mol_type = other RNA
actggcgcttttatctgattacttcgagagccatcaccagcgactatgtcgtagtgggtaaagctccctcttcggagggagcatcaaag

SEQ ID NO: 508 - RNA, 98 nt, synthetic construct
  source 1..98: mol_type = other RNA
actggcacttctatctgattactctgagagccatcaccagcgactatgtcgtatgggtaaagccgcttacggacttcggtccgtaagaggcatcagag

SEQ ID NO: 509 - RNA, 89 nt, synthetic construct
  source 1..89: mol_type = other RNA
actggcacttctatctgattactctgagagccatcaccagcgactatgtcgtagtgggtaaagctccctcttcggagggagcatcagag

SEQ ID NO: 510 - RNA, 98 nt, synthetic construct
  source 1..98: mol_type = other RNA
actggcacctttatctgattactttgagagccatcaccagcgactatgtcgtatgggtaaagccgcttacggacttcggtccgtaagaggcatcaaag

SEQ ID NO: 511 - RNA, 98 nt, synthetic construct
  source 1..98: mol_type = other RNA
actggcacttgtatctgattactctgagagccatcaccagcgactatgtcgtatgggtaaagccgcttacggacttcggtccgtaagaggcatcagag

SEQ ID NO: 512 - RNA, 89 nt, synthetic construct
  source 1..89: mol_type = other RNA
actggcacttgtatctgattactctgagagccatcaccagcgactatgtcgtagtgggtaaagctccctcttcggagggagcatcagag

SEQ ID NO: 513 - RNA, 97 nt, synthetic construct
  source 1..97: mol_type = other RNA
actggcacttctatctgattactctgagagccatcaccagcgactatgtcgtatgggtaaagcgcttacggacttcggtccgtaagaagcatcagag

SEQ ID NO: 514 - RNA, 98 nt, synthetic construct
  source 1..98: mol_type = other RNA
actggcgcttctatctgattactctgagagccatcaccagcgactatgtcgtatgggtaaagccgcttacggacttcggtccgtaagaggcatcagag

SEQ ID NO: 515 - RNA, 98 nt, synthetic construct
  source 1..98: mol_type = other RNA
actggcacttctatctgattactctgagcgccatcaccagcgactatgtcgtatgggtaaagccgcttacggacttcggtccgtaagaggcatcagag

SEQ ID NO: 516 - RNA, 98 nt, synthetic construct
  source 1..98: mol_type = other RNA
actggcgcttctatctgattactctgagcgccatcaccagcgactatgtcgtatgggtaaagccgcttacggacttcggtccgtaagaggcatcagag

SEQ ID NO: 517 - RNA, 98 nt, synthetic construct
  source 1..98: mol_type = other RNA
actggcgcttctatctgattactctgagcgccatcaccagcgactatgtcgtatgggtaaagcgccttacggacttcggtccgtaaggagcatcagag

SEQ ID NO: 518 - RNA, 98 nt, synthetic construct
  source 1..98: mol_type = other RNA
acgggactttctatctgattactctgaagtccctcaccagcgactatgtcgtatgggtaaagccgcttacggacttcggtccgtaagaggcatcagag

SEQ ID NO: 519 - RNA, 98 nt, synthetic construct
  source 1..98: mol_type = other RNA
acctgtagttctatctgattactctgactacagtcaccagcgactatgtcgtatgggtaaagccgcttacggacttcggtccgtaagaggcatcagag

SEQ ID NO: 520 - RNA, 99 nt, synthetic construct
  source 1..99: mol_type = other RNA
actgggccttctatctgattactctgaggcccatcaccagcgactatgtcgtagtgggtaaagccgcttagggacttcggtccctaagaggcatcagag

SEQ ID NO: 521 - RNA, 97 nt, synthetic construct
  source 1..97: mol_type = other RNA
actgggccttctatctgattactctgaggcccatcaccagcgactatgtcgtagtgggtaaagcccttagggacttcggtccctaagggcatcagag

SEQ ID NO: 522 - RNA, 99 nt, synthetic construct
  source 1..99: mol_type = other RNA
actgggccttctatctgattactctgaggcccatcaccagcgactatgtcgtagtgggtaaagcctcttagggacttcggtccctaagaggcatcagag

SEQ ID NO: 523 - RNA, 89 nt, synthetic construct
  source 1..89: mol_type = other RNA
actgggccttctatctgattactctgaggcccatcaccagcgactatgtcgtagtgggtaaagctccctcttcggagggagcatcagag

SEQ ID NO: 524 - RNA, 97 nt, synthetic construct
  source 1..97: mol_type = other RNA
actgggccttctatctgattactctgaggcccatcaccagcgactatgtcgtagtgggtaaagcccttagggaccttggtccctaagggcatcagag

SEQ ID NO: 525 - RNA, 99 nt, synthetic construct
  source 1..99: mol_type = other RNA
actgggccttctatctgattactctgaggcccatcaccagcgactatgtcgtagtgggtaaagcctcttagggaccttggtccctaagaggcatcagag

SEQ ID NO: 526 - RNA, 89 nt, synthetic construct
  source 1..89: mol_type = other RNA
actgggccttctatctgattactctgaggcccatcaccagcgactatgtcgtagtgggtaaagctccctccttggagggagcatcagag

SEQ ID NO: 527 - RNA, 97 nt, synthetic construct
  source 1..97: mol_type = other RNA
actgggccttctatctgattactctgaggcccatcaccagcgactatgtcgtagtgggtaaagcccttagggaggaaactccctaagggcatcagag

SEQ ID NO: 528 - RNA, 99 nt, synthetic construct
  source 1..99: mol_type = other RNA
actgggccttctatctgattactctgaggcccatcaccagcgactatgtcgtagtgggtaaagcctcttagggaggaaactccctaagaggcatcagag

SEQ ID NO: 529 - RNA, 89 nt, synthetic construct
  source 1..89: mol_type = other RNA
actgggccttctatctgattactctgaggcccatcaccagcgactatgtcgtagtgggtaaagctccctggaaacagggagcatcagag

SEQ ID NO: 530 - RNA, 98 nt, synthetic construct
  source 1..98: mol_type = other RNA
actgggccttctatctgattactctgaggcccatcaccagcgactatgtcgtagtgggtaaagcccttagggacttcaggtccctaagggcatcagag

SEQ ID NO: 531 - RNA, 100 nt, synthetic construct
  source 1..100: mol_type = other RNA
actgggccttctatctgattactctgaggcccatcaccagcgactatgtcgtagtgggtaaagcctcttagggacttcaggtccctaagaggcatcagag

SEQ ID NO: 532 - RNA, 90 nt, synthetic construct
  source 1..90: mol_type = other RNA
actgggccttctatctgattactctgaggcccatcaccagcgactatgtcgtagtgggtaaagctccctcttcaggagggagcatcagag

SEQ ID NO: 533 - RNA, 97 nt, synthetic construct
  source 1..97: mol_type = other RNA
actgggccttctatctgattactctgaggcccatcaccaggcactatgtgctagtgggtaaagcccttagggaccttggtccctaagggcatcagag

SEQ ID NO: 534 - RNA, 99 nt, synthetic construct
  source 1..99: mol_type = other RNA
actgggccttctatctgattactctgaggcccatcaccaggcactatgtgctagtgggtaaagcctcttagggaccttggtccctaagaggcatcagag

SEQ ID NO: 535 - RNA, 89 nt, synthetic construct
  source 1..89: mol_type = other RNA
actgggccttctatctgattactctgaggcccatcaccaggcactatgtgctagtgggtaaagctccctccttggagggagcatcagag

SEQ ID NO: 536 - RNA, 97 nt, synthetic construct
  source 1..97: mol_type = other RNA
actgggccttctatctgattactctgaggcccatcaccaggcactatgtgctagtgggtaaagcccttagggaggaaactccctaagggcatcagag

SEQ ID NO: 537 - RNA, 99 nt, synthetic construct
  source 1..99: mol_type = other RNA
actgggccttctatctgattactctgaggcccatcaccaggcactatgtgctagtgggtaaagcctcttagggaggaaactccctaagaggcatcagag

SEQ ID NO: 538 - RNA, 89 nt, synthetic construct
  source 1..89: mol_type = other RNA
actgggccttctatctgattactctgaggcccatcaccaggcactatgtgctagtgggtaaagctccctggaaacagggagcatcagag

SEQ ID NO: 539 - RNA, 98 nt, synthetic construct
  source 1..98: mol_type = other RNA
actgggccttctatctgattactctgaggcccatcaccaggcactatgtgctagtgggtaaagcccttagggacttcaggtccctaagggcatcagag

SEQ ID NO: 540 - RNA, 100 nt, synthetic construct
  source 1..100: mol_type = other RNA
actgggccttctatctgattactctgaggcccatcaccaggcactatgtgctagtgggtaaagcctcttagggacttcaggtccctaagaggcatcagag

SEQ ID NO: 541 - RNA, 90 nt, synthetic construct
  source 1..90: mol_type = other RNA
actgggccttctatctgattactctgaggcccatcaccaggcactatgtgctagtgggtaaagctccctcttcaggagggagcatcagag

SEQ ID NO: 542 - RNA, 21 nt, synthetic construct
  source 1..21: mol_type = other RNA
ccagcgactatgtcgtagtgg

SEQ ID NO: 543 - protein, 692 aa, Homo sapiens
MGTVSSRRSWWPLPLLLLLLLLLGPAGARAQEDEDGDYEELVLALRSEEDGLAEAPEHGTTATFHRCAKDPWRLPGTYVVVLKEETHLSQSERTARRLQAQAARRGYLTKILHVFHGLLPGFLVKMSGDLLELALKLPHVDYIEEDSSVFAQSIPWNLERITPPRYRADEYQPPDGGSLVEVYLLDTSIQSDHREIEGRVMVTDFENVPEEDGTRFHRQASKCDSHGTHLAGVVSGRDAGVAKGASMRSLRVLNCQGKGTVSGTLIGLEFIRKSQLVQPVGPLVVLLPLAGGYSRVLNAACQRLARAGVVLVTAAGNFRDDACLYSPASAPEVITVGATNAQDQPVTLGTLGTNFGRCVDLFAPGEDIIGASSDCSTCFVSQSGTSQAAAHVAGIAAMMLSAEPELTLAELRQRLIHFSAKDVINEAWFPEDQRVLTPNLVAALPPSTHGAGWQLFCRTVWSAHSGPTRMATAVARCAPDEELLSCSSFSRSGKRRGERMEAQGGKLVCRAHNAFGGEGVYAIARCCLLPQANCSVHTAPPAEASMGTRVHCHQQGHVLTGCSSHWEVEDLGTHKPPVLRPRGQPNQCVGHREASIHASCCHAPGLECKVKEHGIPAPQEQVTVACEEGWTLTGCSALPGTSHVLGAYAVDNTCVVRSRDVSTTGSTSEGAVTAVAICCRSRHLAQASQELQ

SEQ ID NO: 544 - RNA, 20 nt, synthetic construct
  source 1..20: mol_type = other RNA
caaaaagggtggctcaccag

SEQ ID NO: 545 - RNA, 20 nt, synthetic construct
  source 1..20: mol_type = other RNA
catctgagctggctttcctc

SEQ ID NO: 546 - RNA, 20 nt, synthetic construct
  source 1..20: mol_type = other RNA
atgctccttgactttgcatt

SEQ ID NO: 547 - RNA, 20 nt, synthetic construct
  source 1..20: mol_type = other RNA
tttcctcgggctctggcagg

SEQ ID NO: 548 - RNA, 20 nt, synthetic construct
  source 1..20: mol_type = other RNA
tcgggctctggcaggtgacc

SEQ ID NO: 549 - RNA, 20 nt, synthetic construct
  source 1..20: mol_type = other RNA
ctggtgctgcctgtagtgct

SEQ ID NO: 550 - RNA, 20 nt, synthetic construct
  source 1..20: mol_type = other RNA
tccttgcatggggccaggat

SEQ ID NO: 551 - RNA, 20 nt, synthetic construct
  source 1..20: mol_type = other RNA
gcaccaccacgtaggtgcca

SEQ ID NO: 552 - RNA, 20 nt, synthetic construct
  source 1..20: mol_type = other RNA
tcctggcttcctggtgaaga

SEQ ID NO: 553 - RNA, 20 nt, synthetic construct
  source 1..20: mol_type = other RNA
tcccaggcctggagtttatt

SEQ ID NO: 554 - RNA, 20 nt, synthetic construct
  source 1..20: mol_type = other RNA
catgtggtccttgtgttcgt

SEQ ID NO: 555 - RNA, 20 nt, synthetic construct
  source 1..20: mol_type = other RNA
acgggatgctctgggcaaag

SEQ ID NO: 556 - RNA, 20 nt, synthetic construct
  source 1..20: mol_type = other RNA
gaataaactccaggcctggg

SEQ ID NO: 557 - RNA, 20 nt, synthetic construct
  source 1..20: mol_type = other RNA
tctgccccaggctgcagctc

SEQ ID NO: 558 - RNA, 20 nt, synthetic construct
  source 1..20: mol_type = other RNA
cctgctcctgaggggccggg

SEQ ID NO: 559 - RNA, 20 nt, synthetic construct
  source 1..20: mol_type = other RNA
agggtgtgggtgcttgacgc

SEQ ID NO: 560 - RNA, 20 nt, synthetic construct
  source 1..20: mol_type = other RNA
gcagcgacgtcgaggcgctc

SEQ ID NO: 561 - RNA, 20 nt, synthetic construct
  source 1..20: mol_type = other RNA
gttcagggtctgagcctgga

SEQ ID NO: 562 - RNA, 20 nt, synthetic construct
  source 1..20: mol_type = other RNA
gggtctgagcctggaggagt

SEQ ID NO: 563 - RNA, 20 nt, synthetic construct
  source 1..20: mol_type = other RNA
ggagcagggcgcgtgaaggg

SEQ ID NO: 564 - RNA, 20 nt, synthetic construct
  source 1..20: mol_type = other RNA
cgcgccctgctcctgaactt

SEQ ID NO: 565 - RNA, 20 nt, synthetic construct
  source 1..20: mol_type = other RNA
gctcctgcacagtcctcccc

SEQ ID NO: 566 - RNA, 20 nt, synthetic construct
  source 1..20: mol_type = other RNA
ccccggcctcccatccctac

SEQ ID NO: 567 - RNA, 20 nt, synthetic construct
  source 1..20: mol_type = other RNA
tccatgtcatcatgttcctc

SEQ ID NO: 568 - RNA, 20 nt, synthetic construct
  source 1..20: mol_type = other RNA
atgtcatcatgttcctcctt

SEQ ID NO: 569 - RNA, 20 nt, synthetic construct
  source 1..20: mol_type = other RNA
tggcttcctggtgaagatga

SEQ ID NO: 570 - RNA, 20 nt, synthetic construct
  source 1..20: mol_type = other RNA
tggtgaagatgagtggcgac

SEQ ID NO: 571 - RNA, 20 nt, synthetic construct
  source 1..20: mol_type = other RNA
tgatagggctgggccactgc

SEQ ID NO: 572 - RNA, 20 nt, synthetic construct
  source 1..20: mol_type = other RNA
gcaatgggcctactaagcac

SEQ ID NO: 573 - RNA, 20 nt, synthetic construct
  source 1..20: mol_type = other RNA
gctcagatggggtggggcag

SEQ ID NO: 574 - RNA, 20 nt, synthetic construct
  source 1..20: mol_type = other RNA
gtgtgttaactataaggttg

SEQ ID NO: 575 - RNA, 20 nt, synthetic construct
  source 1..20: mol_type = other RNA
ctcctctcccacaaatgtcg

SEQ ID NO: 576 - RNA, 20 nt, synthetic construct
  source 1..20: mol_type = other RNA
tccatccagccacctgctga

SEQ ID NO: 577 - RNA, 20 nt, synthetic construct
  source 1..20: mol_type = other RNA
aggtcatcacagttggggcc

SEQ ID NO: 578 - RNA, 20 nt, synthetic construct
  source 1..20: mol_type = other RNA
cccctgcaccaggcattgca

SEQ ID NO: 579 - RNA, 20 nt, synthetic construct
  source 1..20: mol_type = other RNA
ctgccaaagatgtcatcaat

SEQ ID NO: 580 - RNA, 20 nt, synthetic construct
  source 1..20: mol_type = other RNA
ctgaggaccagcgggtactg

SEQ ID NO: 581 - RNA, 20 nt, synthetic construct
  source 1..20: mol_type = other RNA
gtggaggtcccctcactccc

SEQ ID NO: 582 - RNA, 20 nt, synthetic construct
  source 1..20: mol_type = other RNA
cactcctggagaaactggag

SEQ ID NO: 583 - RNA, 20 nt, synthetic construct
  source 1..20: mol_type = other RNA
ccaggagtgggaagcggcgg

SEQ ID NO: 584 - RNA, 20 nt, synthetic construct
  source 1..20: mol_type = other RNA
gtgttttcaaagcccattct

SEQ ID NO: 585 - RNA, 20 nt, synthetic construct
  source 1..20: mol_type = other RNA
aagcccattctaaagcagat

SEQ ID NO: 586 - RNA, 20 nt, synthetic construct
  source 1..20: mol_type = other RNA
aaagcagattcccatttccg

SEQ ID NO: 587 - RNA, 20 nt, synthetic construct
  source 1..20: mol_type = other RNA
catttccgtctttgactcta

SEQ ID NO: 588 - RNA, 20 nt, synthetic construct
  source 1..20: mol_type = other RNA
gtctttgactctaaggccca

SEQ ID NO: 589 - RNA, 20 nt, synthetic construct
  source 1..20: mol_type = other RNA
ccttatgcacccactgcccg

SEQ ID NO: 590 - RNA, 20 nt, synthetic construct
  source 1..20: mol_type = other RNA
tgctgccatgccccaggtct

SEQ ID NO: 591 - RNA, 20 nt, synthetic construct
  source 1..20: mol_type = other RNA
agacctggggcatggcagca

SEQ ID NO: 592 - RNA, 20 nt, synthetic construct
  source 1..20: mol_type = other RNA
gacttgtccctctctcagcc

SEQ ID NO: 593 - RNA, 20 nt, synthetic construct
  source 1..20: mol_type = other RNA
gcctttccggggctgctggc

SEQ ID NO: 594 - RNA, 20 nt, synthetic construct
  source 1..20: mol_type = other RNA
aggcaaggaggctgccccac

SEQ ID NO: 595 - RNA, 20 nt, synthetic construct
  source 1..20: mol_type = other RNA
tggcacctccacctggggag

SEQ ID NO: 596 - RNA, 20 nt, synthetic construct
  source 1..20: mol_type = other RNA
ccattcaaacaggtcgagct

SEQ ID NO: 597 - RNA, 20 nt, synthetic construct
  source 1..20: mol_type = other RNA
aacaggtcgagctgtgctcg

SEQ ID NO: 598 - RNA, 20 nt, synthetic construct
  source 1..20: mol_type = other RNA
gcccacggacatcggcacat

SEQ ID NO: 599 - RNA, 20 nt, synthetic construct
  source 1..20: mol_type = other RNA
gtgccaggcattcaatcctc

SEQ ID NO: 600 - RNA, 20 nt, synthetic construct
  source 1..20: mol_type = other RNA
atcctcaggtctccaccaag

SEQ ID NO: 601 - RNA, 20 nt, synthetic construct
  source 1..20: mol_type = other RNA
tcccatggataggggagggg

SEQ ID NO: 602 - RNA, 20 nt, synthetic construct
  source 1..20: mol_type = other RNA
catggataggggagggggcg

SEQ ID NO: 603 - RNA, 20 nt, synthetic construct
  source 1..20: mol_type = other RNA
cactcaccccccaacgatgt

SEQ ID NO: 604 - RNA, 20 nt, synthetic construct
  source 1..20: mol_type = other RNA
ccacagttagctggagatga

SEQ ID NO: 605 - RNA, 20 nt, synthetic construct
  source 1..20: mol_type = other RNA
ggatggcatctagccagagg

SEQ ID NO: 606 - RNA, 20 nt, synthetic construct
  source 1..20: mol_type = other RNA
tgagccacctttactctgct

SEQ ID NO: 607 - RNA, 20 nt, synthetic construct
  source 1..20: mol_type = other RNA
tcctctgtgaagtaggggtg

SEQ ID NO: 608 - RNA, 20 nt, synthetic construct
  source 1..20: mol_type = other RNA
aggtttcttcctctgtgaag

SEQ ID NO: 609 - RNA, 20 nt, synthetic construct
  source 1..20: mol_type = other RNA
cagaggaagaaacctggaac

SEQ ID NO: 610 - RNA, 20 nt, synthetic construct
  source 1..20: mol_type = other RNA
ggctcagttcctgctgtgtg

SEQ ID NO: 611 - RNA, 20 nt, synthetic construct
  source 1..20: mol_type = other RNA
gagccagcccaatctgcgtt

SEQ ID NO: 612 - RNA, 20 nt, synthetic construct
  source 1..20: mol_type = other RNA
tacttcacccggctgggctc

SEQ ID NO: 613 - RNA, 20 nt, synthetic construct
  source 1..20: mol_type = other RNA
cccggctgggctcctcattt

SEQ ID NO: 614 - RNA, 20 nt, synthetic construct
  source 1..20: mol_type = other RNA
cagcctcactgttacccgta

SEQ ID NO: 615 - RNA, 20 nt, synthetic construct
  source 1..20: mol_type = other RNA
tggtctgtgttccccttccc

SEQ ID NO: 616 - RNA, 20 nt, synthetic construct
  source 1..20: mol_type = other RNA
gccatcactcaccgagcttc

SEQ ID NO: 617 - RNA, 20 nt, synthetic construct
  source 1..20: mol_type = other RNA
atgcctgcaggcatcgttct

SEQ ID NO: 618 - RNA, 20 nt, synthetic construct
  source 1..20: mol_type = other RNA
gccaggccgtcctcctcgga

SEQ ID NO: 619 - RNA, 20 nt, synthetic construct
  source 1..20: mol_type = other RNA
gaggaggacggcctggccga

SEQ ID NO: 620 - RNA, 20 nt, synthetic construct
  source 1..20: mol_type = other RNA
gtgctcgggtgcttcggcca

SEQ ID NO: 621 - RNA, 20 nt, synthetic construct
  source 1..20: mol_type = other RNA
accgctgcgccaaggtgcgg

SEQ ID NO: 622 - RNA, 20 nt, synthetic construct
  source 1..20: mol_type = other RNA
gagtgaaatggcctgctctg

SEQ ID NO: 623 - RNA, 20 nt, synthetic construct
  source 1..20: mol_type = other RNA
gagcaggccatttcactcgg

SEQ ID NO: 624 - RNA, 20 nt, synthetic construct
  source 1..20: mol_type = other RNA
ctcggaatctgctgtgcatc

SEQ ID NO: 625 - RNA, 20 nt, synthetic construct
  source 1..20: mol_type = other RNA
cctttgtttcttcccagtat

SEQ ID NO: 626 - RNA, 20 nt, synthetic construct
  source 1..20: mol_type = other RNA
tcccagtatcgacagccctt

SEQ ID NO: 627 - RNA, 20 nt, synthetic construct
  source 1..20: mol_type = other RNA
ggaagggctgtcgatactgg

SEQ ID NO: 628 - RNA, 20 nt, synthetic construct
  source 1..20: mol_type = other RNA
cagtatcgacagcccttcca

SEQ ID NO: 629 - RNA, 20 nt, synthetic construct
  source 1..20: mol_type = other RNA
agaaagagcaagcctcatgt

SEQ ID NO: 630 - RNA, 20 nt, synthetic construct
  source 1..20: mol_type = other RNA
ccttttcatcctcctgcctg

SEQ ID NO: 631 - RNA, 20 nt, synthetic construct
  source 1..20: mol_type = other RNA
tcctcctgcctggtacacaa

SEQ ID NO: 632 - RNA, 20 nt, synthetic construct
  source 1..20: mol_type = other RNA
agcccagttaggatttggga

SEQ ID NO: 633 - RNA, 20 nt, synthetic construct
  source 1..20: mol_type = other RNA
tccctctgcgcgtaatctga

SEQ ID NO: 634 - RNA, 20 nt, synthetic construct
  source 1..20: mol_type = other RNA
ctctgcgcgtaatctgacgc

SEQ ID NO: 635 - RNA, 20 nt, synthetic construct
  source 1..20: mol_type = other RNA
cttggcacgatcttggggac

SEQ ID NO: 636 - RNA, 20 nt, synthetic construct
  source 1..20: mol_type = other RNA
cactgaatagcgcagccgca

SEQ ID NO: 637 - RNA, 20 nt, synthetic construct
  source 1..20: mol_type = other RNA
gtgggaaggttcgcggggtt

SEQ ID NO: 638 - RNA, 20 nt, synthetic construct
  source 1..20: mol_type = other RNA
cggggttgggagacccggag

SEQ ID NO: 639 - RNA, 20 nt, synthetic construct
  source 1..20: mol_type = other RNA
tcggcctccgggtctcccaa

SEQ ID NO: 640 - RNA, 20 nt, synthetic construct
  source 1..20: mol_type = other RNA
cagtacgttccaggcattca

SEQ ID NO: 641 - RNA, 20 nt, synthetic construct
  source 1..20: mol_type = other RNA
aaaccaaatcggaacccact

SEQ ID NO: 642 - RNA, 20 nt, synthetic construct
  source 1..20: mol_type = other RNA
gatttggtttggaaaacatg

SEQ ID NO: 643 - RNA, 20 nt, synthetic construct
  source 1..20: mol_type = other RNA
ctccaggccctccaccctcc

SEQ ID NO: 644 - RNA, 20 nt, synthetic construct
  source 1..20: mol_type = other RNA
acagacaggtaagcacggcc

SEQ ID NO: 645 - RNA, 20 nt, synthetic construct
  source 1..20: mol_type = other RNA
atggccttcttcctggcttc

SEQ ID NO: 646 - RNA, 20 nt, synthetic construct
  source 1..20: mol_type = other RNA
ccaggaagccaggaagaagg

SEQ ID NO: 647 - RNA, 20 nt, synthetic construct
  source 1..20: mol_type = other RNA
aggcctgcagaagccagaga

SEQ ID NO: 648 - RNA, 20 nt, synthetic construct
  source 1..20: mol_type = other RNA
gcaggccttgaagttgcccc

SEQ ID NO: 649 - RNA, 20 nt, synthetic construct
  source 1..20: mol_type = other RNA
tccgcccggtaccgtggagg

SEQ ID NO: 650 - RNA, 20 nt, synthetic construct
  source 1..20: mol_type = other RNA
cggtggtcactctgtatgct

SEQ ID NO: 651 - RNA, 20 nt, synthetic construct
  source 1..20: mol_type = other RNA
cgaagtcggtgaccatgacc

SEQ ID NO: 652 - RNA, 20 nt, synthetic construct
  source 1..20: mol_type = other RNA
agaatgtgcccgaggaggac

SEQ ID NO: 653 - RNA, 20 nt, synthetic construct
  source 1..20: mol_type = other RNA
tcgagcaggccagcaagtgt

SEQ ID NO: 654 - RNA, 20 nt, synthetic construct
  source 1..20: mol_type = other RNA
cttggcagttgagcacgcgc

SEQ ID NO: 655 - RNA, 20 nt, synthetic construct
  source 1..20: mol_type = other RNA
gaaaagccagctggtccagc

SEQ ID NO: 656 - RNA, 20 nt, synthetic construct
  source 1..20: mol_type = other RNA
gggacgatgcctgcctctac

SEQ ID NO: 657 - RNA, 20 nt, synthetic construct
  source 1..20: mol_type = other RNA
ggggctgctggcctggccct

SEQ ID NO: 658 - RNA, 20 nt, synthetic construct
  source 1..20: mol_type = other RNA
tctgtgaagtaggggtgcga

SEQ ID NO: 659 - RNA, 20 nt, synthetic construct
  source 1..20: mol_type = other RNA
tgctgtgtgagcttggcagg

SEQ ID NO: 660 - RNA, 20 nt, synthetic construct
  source 1..20: mol_type = other RNA
ccttcccagcctcactgtta

SEQ ID NO: 661 - RNA, 20 nt, synthetic construct
  source 1..20: mol_type = other RNA
gttatcacccaggcctgatt

SEQ ID NO: 662 - RNA, 20 nt, synthetic construct
  source 1..20: mol_type = other RNA
ctggcctggcggagatgctt

SEQ ID NO: 663 - RNA, 20 nt, synthetic construct
  source 1..20: mol_type = other RNA
aaggcatggtcgggggagag

SEQ ID NO: 664 - RNA, 20 nt, synthetic construct
  source 1..20: mol_type = other RNA
agacctgttttgcttttgta

SEQ ID NO: 665 - RNA, 20 nt, synthetic construct
  source 1..20: mol_type = other RNA
agttacaaaagcaaaacagg

SEQ ID NO: 666 - RNA, 20 nt, synthetic construct
  source 1..20: mol_type = other RNA
gatgggacccaaggtggtct

SEQ ID NO: 667 - RNA, 20 nt, synthetic construct
  source 1..20: mol_type = other RNA
gatgattcagatgggaccca

SEQ ID NO: 668 - RNA, 20 nt, synthetic construct
  source 1..20: mol_type = other RNA
ctatgacattctgatgattc

SEQ ID NO: 669 - RNA, 20 nt, synthetic construct
  source 1..20: mol_type = other RNA
gatccttttgattatttctc

SEQ ID NO: 670 - RNA, 20 nt, synthetic construct
  source 1..20: mol_type = other RNA
agcgcaaagctgaggatgac

SEQ ID NO: 671 - RNA, 20 nt, synthetic construct
  source 1..20: mol_type = other RNA
cagatggtcatcctcagctt

SEQ ID NO: 672 - RNA, 20 nt, synthetic construct
  source 1..20: mol_type = other RNA
atttagagtctgtgtttccc

SEQ ID NO: 673 - RNA, 20 nt, synthetic construct
  source 1..20: mol_type = other RNA
taccacagagatgacacaat

SEQ ID NO: 674 - RNA, 20 nt, synthetic construct
  source 1..20: mol_type = other RNA
gactgtcattgtgtcatctc

SEQ ID NO: 675 - RNA, 20 nt, synthetic construct
  source 1..20: mol_type = other RNA
tctcctaggatacaactttt

SEQ ID NO: 676 - RNA, 20 nt, synthetic construct
  source 1..20: mol_type = other RNA
tccagaagagcccagtttca

SEQ ID NO: 677 - RNA, 20 nt, synthetic construct
  source 1..20: mol_type = other RNA
agaagagcccagtttcacca

SEQ ID NO: 678 - RNA, 20 nt, synthetic construct
  source 1..20: mol_type = other RNA
ggaagaagatgcccaatagt

SEQ ID NO: 679 - RNA, 20 nt, synthetic construct
  source 1..20: mol_type = other RNA
ccatggttgaagacttgctt

SEQ ID NO: 680 - RNA, 20 nt, synthetic construct
  source 1..20: mol_type = other RNA
accatggtgaaactgggctc

SEQ ID NO: 681 - RNA, 20 nt, synthetic construct
  source 1..20: mol_type = other RNA
cagtccaacccattcctgaa

SEQ ID NO: 682 - RNA, 20 nt, synthetic construct
  source 1..20: mol_type = other RNA
tgaatctgtgtaattgtccc

SEQ ID NO: 683 - RNA, 20 nt, synthetic construct
  source 1..20: mol_type = other RNA
ggaatgggttggactgagaa

SEQ ID NO: 684 - RNA, 20 nt, synthetic construct
  source 1..20: mol_type = other RNA
tcttaactaagcacttacca

SEQ ID NO: 685 - RNA, 20 nt, synthetic construct
  source 1..20: mol_type = other RNA
cttcctttcttcctagtttc

SEQ ID NO: 686 - RNA, 20 nt, synthetic construct
  source 1..20: mol_type = other RNA
ttccttactatatcgagaac

SEQ ID NO: 687 - RNA, 20 nt, synthetic construct
  source 1..20: mol_type = other RNA
ttactatatcgagaactttc

SEQ ID NO: 688 - RNA, 20 nt, synthetic construct
  source 1..20: mol_type = other RNA
cgatatagtaaggaaagaaa

SEQ ID NO: 689 - RNA, 20 nt, synthetic construct
  source 1..20: mol_type = other RNA
tcttctcacttaaaggaagc

SEQ ID NO: 690 - RNA, 20 nt, synthetic construct
  source 1..20: mol_type = other RNA
tctcacttaaaggaagcact

SEQ ID NO: 691 - RNA, 20 nt, synthetic construct
  source 1..20: mol_type = other RNA
cacttaaaggaagcactctc

SEQ ID NO: 692 - RNA, 20 nt, synthetic construct
  source 1..20: mol_type = other RNA
tttaagtgagaagaagaaag

SEQ ID NO: 693 - RNA, 20 nt, synthetic construct
  source 1..20: mol_type = other RNA
gggagacctgtgaggagagt

SEQ ID NO: 694 - RNA, 20 nt, synthetic construct
  source 1..20: mol_type = other RNA
tcctccatgtggcaccgagt

SEQ ID NO: 695 - RNA, 20 nt, synthetic construct
  source 1..20: mol_type = other RNA
ctctcatttagacattcttc

SEQ ID NO: 696 - RNA, 20 nt, synthetic construct
  source 1..20: mol_type = other RNA
tcagaactcagctcaaaagt

SEQ ID NO: 697 - RNA, 20 nt, synthetic construct
  source 1..20: mol_type = other RNA
gaactcagctcaaaagttac

SEQ ID NO: 698 - RNA, 20 nt, synthetic construct
  source 1..20: mol_type = other RNA
gaagaatgtctaaatgagag

SEQ ID NO: 699 - RNA, 20 nt, synthetic construct
  source 1..20: mol_type = other RNA
tcaaggaagcctttcctgac

SEQ ID NO: 700 - RNA, 20 nt, synthetic construct
  source 1..20: mol_type = other RNA
ttgaggaagtaacttttgag

SEQ ID NO: 701 - RNA, 20 nt, synthetic construct
  source 1..20: mol_type = other RNA
tgacattgcccacattagaa

SEQ ID NO: 702 - RNA, 20 nt, synthetic construct
  source 1..20: mol_type = other RNA
acatttttgggtatctttac

SEQ ID NO: 703 - RNA, 20 nt, synthetic construct
  source 1..20: mol_type = other RNA
aaagttgcttccacattttt

SEQ ID NO: 704 - RNA, 20 nt, synthetic construct
  source 1..20: mol_type = other RNA
gcctgttacccagttccaaa

SEQ ID NO: 705 - RNA, 20 nt, synthetic construct
  source 1..20: mol_type = other RNA
aacttctgcctgttacccag

SEQ ID NO: 706 - RNA, 20 nt, synthetic construct
  source 1..20: mol_type = other RNA
gagccctgcaaactgttcca

SEQ ID NO: 707 - RNA, 20 nt, synthetic construct
  source 1..20: mol_type = other RNA
tctgagccctgcaaactgtt

SEQ ID NO: 708 - RNA, 20 nt, synthetic construct
  source 1..20: mol_type = other RNA
tgtcttcttctgagccctgc

SEQ ID NO: 709 - RNA, 20 nt, synthetic construct
  source 1..20: mol_type = other RNA
cacattttcctgtcttcttc

SEQ ID NO: 710 - RNA, 20 nt, synthetic construct
  source 1..20: mol_type = other RNA
aaactttcccacattttcct

SEQ ID NO: 711 - RNA, 20 nt, synthetic construct
  source 1..20: mol_type = other RNA
tagagacttgttgaatggct

SEQ ID NO: 712 - RNA, 20 nt, synthetic construct
  source 1..20: mol_type = other RNA
acaagtctctaggaagttcc

SEQ ID NO: 713 - RNA, 20 nt, synthetic construct
  source 1..20: mol_type = other RNA
ttgtccatattattattagc

SEQ ID NO: 714 - RNA, 20 nt, synthetic construct
  source 1..20: mol_type = other RNA
tcatctccatctgagactac

SEQ ID NO: 715 - RNA, 20 nt, synthetic construct
  source 1..20: mol_type = other RNA
caacaagttcctcatctcca

SEQ ID NO: 716 - RNA, 20 nt, synthetic construct
  source 1..20: mol_type = other RNA
acaaatctctaaggcagggg

SEQ ID NO: 717 - RNA, 20 nt, synthetic construct
  source 1..20: mol_type = other RNA
aagttccacaaatctctaag

SEQ ID NO: 718 - RNA, 20 nt, synthetic construct
  source 1..20: mol_type = other RNA
agttcaaagttccacaaatc

SEQ ID NO: 719 - RNA, 20 nt, synthetic construct
  source 1..20: mol_type = other RNA
agaggtgacttgggtgctgt

SEQ ID NO: 720 - RNA, 20 nt, synthetic construct
  source 1..20: mol_type = other RNA
gttttaaaatgaagtagagc

SEQ ID NO: 721 - RNA, 20 nt, synthetic construct
  source 1..20: mol_type = other RNA
ttttaaaactgaatgctttt

SEQ ID NO: 722 - RNA, 20 nt, synthetic construct
  source 1..20: mol_type = other RNA
gaaaatttgcagcttgataa

SEQ ID NO: 723 - RNA, 20 nt, synthetic construct
  source 1..20: mol_type = other RNA
gaacttttatgctctacttc

SEQ ID NO: 724 - RNA, 20 nt, synthetic construct
  source 1..20: mol_type = other RNA
attgtattatcaagctgcaa

SEQ ID NO: 725 - RNA, 20 nt, synthetic construct
  source 1..20: mol_type = other RNA
tttctattgtattatcaagc

SEQ ID NO: 726 - RNA, 20 nt, synthetic construct
  source 1..20: mol_type = other RNA
gagaagaaattcaaactggc

SEQ ID NO: 727 - RNA, 20 nt, synthetic construct
  source 1..20: mol_type = other RNA
cagaaaatgggtttttcttt

SEQ ID NO: 728 - RNA, 20 nt, synthetic construct
  source 1..20: mol_type = other RNA
tctcagaaaatgggtttttc

SEQ ID NO: 729 - RNA, 20 nt, synthetic construct
  source 1..20: mol_type = other RNA
aactggctgcagaaatttgc

SEQ ID NO: 730 - RNA, 20 nt, synthetic construct
  source 1..20: mol_type = other RNA
gcagccagtttgaatttctt

SEQ ID NO: 731 - RNA, 20 nt, synthetic construct
  source 1..20: mol_type = other RNA
ctccatgtctcacagccggg

SEQ ID NO: 732 - RNA, 20 nt, synthetic construct
  source 1..20: mol_type = other RNA
ggccccacttacagtttctt

SEQ ID NO: 733 - RNA, 20 nt, synthetic construct
  source 1..20: mol_type = other RNA
tcattgaatttatctgtttg

SEQ ID NO: 734 - RNA, 20 nt, synthetic construct
  source 1..20: mol_type = other RNA
ttgaatttatctgtttgaaa

SEQ ID NO: 735 - RNA, 20 nt, synthetic construct
  source 1..20: mol_type = other RNA
atgaagaaactgtaagtggg

SEQ ID NO: 736 - RNA, 20 nt, synthetic construct
  source 1..20: mol_type = other RNA
aacagataaattcaatgaag

SEQ ID NO: 737 - RNA, 20 nt, synthetic construct
  source 1..20: mol_type = other RNA
aataatcatataaatatata

SEQ ID NO: 738 - RNA, 20 nt, synthetic construct
  source 1..20: mol_type = other RNA
ccatgttgcccaggcaggtc

SEQ ID NO: 739 - RNA, 20 nt, synthetic construct
  source 1..20: mol_type = other RNA
actaataaaagatatactca

SEQ ID NO: 740 - RNA, 20 nt, synthetic construct
  source 1..20: mol_type = other RNA
tattccactaataaaagata

SEQ ID NO: 741 - RNA, 20 nt, synthetic construct
  source 1..20: mol_type = other RNA
gacggatttcaccaagtctt

SEQ ID NO: 742 - RNA, 20 nt, synthetic construct
  source 1..20: mol_type = other RNA
ccaagtcttttaagtcattg

SEQ ID NO: 743 - RNA, 20 nt, synthetic construct
  source 1..20: mol_type = other RNA
tttttaaccccaagagctca

SEQ ID NO: 744 - RNA, 20 nt, synthetic construct
  source 1..20: mol_type = other RNA
aagctaactttagtgttcat

SEQ ID NO: 745 - RNA, 20 nt, synthetic construct
  source 1..20: mol_type = other RNA
ttttaggaaactaaggagaa

SEQ ID NO: 746 - RNA, 20 nt, synthetic construct
  source 1..20: mol_type = other RNA
taaaatgaacactaaagtta

SEQ ID NO: 747 - RNA, 20 nt, synthetic construct
  source 1..20: mol_type = other RNA
ccttagtttcctaaaatgaa

SEQ ID NO: 748 - RNA, 20 nt, synthetic construct
  source 1..20: mol_type = other RNA
aaattgggttttaacagcgc

SEQ ID NO: 749 - RNA, 20 nt, synthetic construct
  source 1..20: mol_type = other RNA
tcttctaaattgggttttaa

SEQ ID NO: 750 - RNA, 20 nt, synthetic construct
  source 1..20: mol_type = other RNA
tgagacaaaatctttctcta

SEQ ID NO: 751 - RNA, 20 nt, synthetic construct
  source 1..20: mol_type = other RNA
ctattgcccaggctggagta

SEQ ID NO: 752 - RNA, 20 nt, synthetic construct
  source 1..20: mol_type = other RNA
ttttgccacagagttaaaca

SEQ ID NO: 753 - RNA, 20 nt, synthetic construct
  source 1..20: mol_type = other RNA
actgccataccctcccatct

SEQ ID NO: 754 - RNA, 20 nt, synthetic construct
  source 1..20: mol_type = other RNA
ccccatcactccctgccaag

SEQ ID NO: 755 - RNA, 20 nt, synthetic construct
  source 1..20: mol_type = other RNA
ttggtttctggaaaggagaa

SEQ ID NO: 756 - RNA, 20 nt, synthetic construct
  source 1..20: mol_type = other RNA
ggaaaggagaaatgacagtg

SEQ ID NO: 757 - RNA, 20 nt, synthetic construct
  source 1..20: mol_type = other RNA
agaaaccaaggaagtgcctc

SEQ ID NO: 758 - RNA, 20 nt, synthetic construct
  source 1..20: mol_type = other RNA
cctttccagaaaccaaggaa

SEQ ID NO: 759 - RNA, 20 nt, synthetic construct
  source 1..20: mol_type = other RNA
tgccttcttaatgagaaagc

SEQ ID NO: 760 - RNA, 20 nt, synthetic construct
  source 1..20: mol_type = other RNA
taatgagaaagctttcgtaa

SEQ ID NO: 761 - RNA, 20 nt, synthetic construct
  source 1..20: mol_type = other RNA
taacaaactggtggcttctc

SEQ ID NO: 762 - RNA, 20 nt, synthetic construct
  source 1..20: mol_type = other RNA
cagtgtgtttgcagctgctc

SEQ ID NO: 763 - RNA, 20 nt, synthetic construct
  source 1..20: mol_type = other RNA
cctgtggctcacggggcctg

SEQ ID NO: 764 - RNA, 20 nt, synthetic construct
  source 1..20: mol_type = other RNA
caggccccgtgagccacagg

SEQ ID NO: 765 - RNA, 20 nt, synthetic construct
  source 1..20: mol_type = other RNA
attctaccatgctgcaacta

SEQ ID NO: 766 - RNA, 20 nt, synthetic construct
  source 1..20: mol_type = other RNA
accatgctgcaactatccct

SEQ ID NO: 767 - RNA, 20 nt, synthetic construct
  source 1..20: mol_type = other RNA
caggctgcgggagggatagt

SEQ ID NO: 768 - RNA, 20 nt, synthetic construct
  source 1..20: mol_type = other RNA
aagaacaaataaaggccctc

SEQ ID NO: 769 - RNA, 20 nt, synthetic construct
  source 1..20: mol_type = other RNA
tggaatcctaccctgtttcc

SEQ ID NO: 770 - RNA, 20 nt, synthetic construct
  source 1..20: mol_type = other RNA
gcgtcagagtttttaaagat

SEQ ID NO: 771 - RNA, 20 nt, synthetic construct
  source 1..20: mol_type = other RNA
gaagtggggagtgctggttg

SEQ ID NO: 772 - RNA, 20 nt, synthetic construct
  source 1..20: mol_type = other RNA
gaagcccctacctgccaaat

SEQ ID NO: 773 - RNA, 20 nt, synthetic construct
  source 1..20: mol_type = other RNA
gccatcccacccagaaacag

SEQ ID NO: 774 - RNA, 20 nt, synthetic construct
  source 1..20: mol_type = other RNA
agcactagtcttagctttta

SEQ ID NO: 775 - RNA, 20 nt, synthetic construct
  source 1..20: mol_type = other RNA
gcctaattttacccagctcc

SEQ ID NO: 776 - RNA, 20 nt, synthetic construct
  source 1..20: mol_type = other RNA
cagaaggttaggcattctaa

SEQ ID NO: 777 - RNA, 20 nt, synthetic construct
  source 1..20: mol_type = other RNA
gggaatgcaggccagtaggt

SEQ ID NO: 778 - RNA, 20 nt, synthetic construct
  source 1..20: mol_type = other RNA
aagtcacaggatgagatacg

SEQ ID NO: 779 - RNA, 20 nt, synthetic construct
  source 1..20: mol_type = other RNA
tgacgttaccgtggcatttg

SEQ ID NO: 780 - RNA, 20 nt, synthetic construct
  source 1..20: mol_type = other RNA
ctttttagaccatatagggt

SEQ ID NO: 781 - RNA, 20 nt, synthetic construct
  source 1..20: mol_type = other RNA
tgccttccctttttagacca

SEQ ID NO: 782 - RNA, 20 nt, synthetic construct
  source 1..20: mol_type = other RNA
tcaagaaataactataaaaa

SEQ ID NO: 783 - RNA, 20 nt, synthetic construct
  source 1..20: mol_type = other RNA
tgatgaaatgctaaacaaag

SEQ ID NO: 784 - RNA, 20 nt, synthetic construct
  source 1..20: mol_type = other RNA
gtcttggagagctgaagtca

SEQ ID NO: 785 - RNA, 20 nt, synthetic construct
  source 1..20: mol_type = other RNA
ccaggaccagccaacctaat

SEQ ID NO: 786 - RNA, 20 nt, synthetic construct
  source 1..20: mol_type = other RNA
aaatgtcacatggtttcctg

SEQ ID NO: 787 - RNA, 20 nt, synthetic construct
  source 1..20: mol_type = other RNA
tgcaggtctaggcctttgca

SEQ ID NO: 788 - RNA, 20 nt, synthetic construct
  source 1..20: mol_type = other RNA
tctttggagagagacaccaa

SEQ ID NO: 789 - RNA, 20 nt, synthetic construct
  source 1..20: mol_type = other RNA
ttggagagagacaccaagtg

SEQ ID NO: 790 - RNA, 20 nt, synthetic construct
  source 1..20: mol_type = other RNA
tcgactctgctaagccagag

SEQ ID NO: 791 - RNA, 20 nt, synthetic construct
  source 1..20: mol_type = other RNA
gagcacatgctcacggccac

SEQ ID NO: 792 - RNA, 20 nt, synthetic construct
  source 1..20: mol_type = other RNA
attcccagctctacttcttg

SEQ ID NO: 793 - RNA, 20 nt, synthetic construct
  source 1..20: mol_type = other RNA
cagctctacttcttgttaaa

SEQ ID NO: 794 - RNA, 20 nt, synthetic construct
  source 1..20: mol_type = other RNA
tgttaaagctatgtccactt

SEQ ID NO: 795 - RNA, 20 nt, synthetic construct
  source 1..20: mol_type = other RNA
gagatcatgctgccttatta

SEQ ID NO: 796 - RNA, 20 nt, synthetic construct
  source 1..20: mol_type = other RNA
agacctgactaagatgtccc

SEQ ID NO: 797 - RNA, 20 nt, synthetic construct
  source 1..20: mol_type = other RNA
ctcttcaagacctgactaag

SEQ ID NO: 798 - RNA, 20 nt, synthetic construct
  source 1..20: mol_type = other RNA
ctggataaggaggagggaaa

SEQ ID NO: 799 - RNA, 20 nt, synthetic construct
  source 1..20: mol_type = other RNA
ctcctccttatccagagaac

SEQ ID NO: 800 - RNA, 20 nt, synthetic construct
  source 1..20: mol_type = other RNA
gggcaggaggaacaacgtgt

SEQ ID NO: 801 - RNA, 20 nt, synthetic construct
  source 1..20: mol_type = other RNA
tcctgcccagaatgcctttc

SEQ ID NO: 802 - RNA, 20 nt, synthetic construct
  source 1..20: mol_type = other RNA
aaaagttgactttttattga

SEQ ID NO: 803 - RNA, 20 nt, synthetic construct
  source 1..20: mol_type = other RNA
ataaaaagtcaactttttga

SEQ ID NO: 804 - RNA, 20 nt, synthetic construct
  source 1..20: mol_type = other RNA
tctacagatgcttttggatt

SEQ ID NO: 805 - RNA, 20 nt, synthetic construct
  source 1..20: mol_type = other RNA
tcctgtttttatttattttc

SEQ ID NO: 806 - RNA, 20 nt, synthetic construct
  source 1..20: mol_type = other RNA
tgtttttatttattttcctt

SEQ ID NO: 807 - RNA, 20 nt, synthetic construct
  source 1..20: mol_type = other RNA
ttaccttattgcactagcga

SEQ ID NO: 808 - RNA, 20 nt, synthetic construct
  source 1..20: mol_type = other RNA
tcatctcagtgggaaaactt

SEQ ID NO: 809 - RNA, 20 nt, synthetic construct
  source 1..20: mol_type = other RNA
cactgagatgaggaaagaga

SEQ ID NO: 810 - RNA, 20 nt, synthetic construct
  source 1..20: mol_type = other RNA
atatttcactattaattaaa

SEQ ID NO: 811 - RNA, 20 nt, synthetic construct
  source 1..20: mol_type = other RNA
ctattaattaaaatatttgc

SEQ ID NO: 812 - RNA, 20 nt, synthetic construct
  source 1..20: mol_type = other RNA
gtgtttaggcattgtccacc

SEQ ID NO: 813 - RNA, 20 nt, synthetic construct
  source 1..20: mol_type = other RNA
ggccatggttggtgaaacta

SEQ ID NO: 814 - RNA, 20 nt, synthetic construct
  source 1..20: mol_type = other RNA
ccaaccatggccagaaacct

SEQ ID NO: 815 - RNA, 20 nt, synthetic construct
  source 1..20: mol_type = other RNA
catatggaggtgcctaaccg

SEQ ID NO: 816 - RNA, 20 nt, synthetic construct
  source 1..20: mol_type = other RNA
ctcggtacctgggtgtaatc

SEQ ID NO: 817 - RNA, 20 nt, synthetic construct
  source 1..20: mol_type = other RNA
ctccagagcctactatgagc

SEQ ID NO: 818 - RNA, 20 nt, synthetic construct
  source 1..20: mol_type = other RNA
aagaagggagcctggttaat

SEQ ID NO: 819 - RNA, 20 nt, synthetic construct
  source 1..20: mol_type = other RNA
tagaacagcagcacaaaagc

SEQ ID NO: 820 - RNA, 20 nt, synthetic construct
  source 1..20: mol_type = other RNA
ccagactccaaagagtgctg

SEQ ID NO: 821 - RNA, 20 nt, synthetic construct
  source 1..20: mol_type = other RNA
aagctattggatctttgttt

SEQ ID NO: 822 - RNA, 20 nt, synthetic construct
  source 1..20: mol_type = other RNA
cacagcaatacaaagacatg

SEQ ID NO: 823 - RNA, 20 nt, synthetic construct
  source 1..20: mol_type = other RNA
catttctcacagcaatacaa

SEQ ID NO: 824 - RNA, 20 nt, synthetic construct
  source 1..20: mol_type = other RNA
tcttcaaagattataaaaag

SEQ ID NO: 825 - RNA, 20 nt, synthetic construct
  source 1..20: mol_type = other RNA
tcaaagattataaaaagtca

SEQ ID NO: 826 - RNA, 20 nt, synthetic construct
  source 1..20: mol_type = other RNA
aagattataaaaagtcataa

SEQ ID NO: 827 - RNA, 20 nt, synthetic construct
  source 1..20: mol_type = other RNA
tcttataacactgttaacca

SEQ ID NO: 828 - RNA, 20 nt, synthetic construct
  source 1..20: mol_type = other RNA
tataacactgttaaccacta

SEQ ID NO: 829 - RNA, 20 nt, synthetic construct
  source 1..20: mol_type = other RNA
tccttaactatccctagata

SEQ ID NO: 830 - RNA, 20 nt, synthetic construct
  source 1..20: mol_type = other RNA
ttaactatccctagataact

SEQ ID NO: 831 - RNA, 20 nt, synthetic construct
  source 1..20: mol_type = other RNA
ttttctttctttgttctgtt

SEQ ID NO: 832 - RNA, 20 nt, synthetic construct
  source 1..20: mol_type = other RNA
ttctttgttctgttcccctt

SEQ ID NO: 833 - RNA, 20 nt, synthetic construct
  source 1..20: mol_type = other RNA
ttgttctgttccccttacct

SEQ ID NO: 834 - RNA, 20 nt, synthetic construct
  source 1..20: mol_type = other RNA
gttccccttacctaattaag

SEQ ID NO: 835 - RNA, 20 nt, synthetic construct
  source 1..20: mol_type = other RNA
ccttacctaattaagaaagt

SEQ ID NO: 836 - RNA, 20 nt, synthetic construct
  source 1..20: mol_type = other RNA
taattaggtaaggggaacag

SEQ ID NO: 837 - RNA, 20 nt, synthetic construct
  source 1..20: mol_type = other RNA
ttttataaattactcacatt

SEQ ID NO: 838 - RNA, 20 nt, synthetic construct
  source 1..20: mol_type = other RNA
gcctagtaattttgggggtc

SEQ ID NO: 839 - RNA, 20 nt, synthetic construct
  source 1..20: mol_type = other RNA
cttcagcctagtaattttgg

SEQ ID NO: 840 - RNA, 20 nt, synthetic construct
  source 1..20: mol_type = other RNA
attcaaagtctcactaagat

SEQ ID NO: 841 - RNA, 20 nt, synthetic construct
  source 1..20: mol_type = other RNA
aagtctcactaagataaatg

SEQ ID NO: 842 - RNA, 20 nt, synthetic construct
  source 1..20: mol_type = other RNA
aaaggaggcagttagatatg

SEQ ID NO: 843 - RNA, 20 nt, synthetic construct
  source 1..20: mol_type = other RNA
tgcctttccagacagaacca

SEQ ID NO: 844 - RNA, 20 nt, synthetic construct
  source 1..20: mol_type = other RNA
agacagaaccaatgttcatt

SEQ ID NO: 845 - RNA, 20 nt, synthetic construct
  source 1..20: mol_type = other RNA
gtctggaaaggcaggaaaac

SEQ ID NO: 846 - RNA, 20 nt, synthetic construct
  source 1..20: mol_type = other RNA
ttttacatatgttaattaat

SEQ ID NO: 847 - RNA, 20 nt, synthetic construct
  source 1..20: mol_type = other RNA
cttttaacaagggaggcatg

SEQ ID NO: 848 - RNA, 20 nt, synthetic construct
  source 1..20: mol_type = other RNA
ttcacttttaacaagggagg

SEQ ID NO: 849 - RNA, 20 nt, synthetic construct
  source 1..20: mol_type = other RNA
gtactcaattctttcacttt

SEQ ID NO: 850 - RNA, 20 nt, synthetic construct
  source 1..20: mol_type = other RNA
acaattttagaaacatattt

SEQ ID NO: 851 - RNA, 20 nt, synthetic construct
  source 1..20: mol_type = other RNA
tatctataaatgcccatatc

SEQ ID NO: 852 - RNA, 20 nt, synthetic construct
  source 1..20: mol_type = other RNA
ggatttcttgctttttaggg

SEQ ID NO: 853 - RNA, 20 nt, synthetic construct
  source 1..20: mol_type = other RNA
tgctttttagggtttcacta

SEQ ID NO: 854 - RNA, 20 nt, synthetic construct
  source 1..20: mol_type = other RNA
ctaaaattttagcataagaa

SEQ ID NO: 855 - RNA, 20 nt, synthetic construct
  source 1..20: mol_type = other RNA
tatgctaaaattttagtgaa

SEQ ID NO: 856 - RNA, 20 nt, synthetic construct
  source 1..20: mol_type = other RNA
gtgtacaaaatgtgcccaaa

SEQ ID NO: 857 - RNA, 20 nt, synthetic construct
  source 1..20: mol_type = other RNA
cactaataacccttttgggc

SEQ ID NO: 858 - RNA, 20 nt, synthetic construct
  source 1..20: mol_type = other RNA
ttttctcactaataaccctt

SEQ ID NO: 859 - RNA, 20 nt, synthetic construct
  source 1..20: mol_type = other RNA
gaagttatccaaaagttagt

SEQ ID NO: 860 - RNA, 20 nt, synthetic construct
  source 1..20: mol_type = other RNA
gaattagacaaaattattct

SEQ ID NO: 861 - RNA, 20 nt, synthetic construct
  source 1..20: mol_type = other RNA
aattacagatttgaaaaggt

SEQ ID NO: 862 - RNA, 20 nt, synthetic construct
  source 1..20: mol_type = other RNA
aatctgtaatttgaactaac

SEQ ID NO: 863 - RNA, 20 nt, synthetic construct
  source 1..20: mol_type = other RNA
taaataaccttttcaaatct

SEQ ID NO: 864 - RNA, 20 nt, synthetic construct
  source 1..20: mol_type = other RNA
ttactacattgtttcataaa

SEQ ID NO: 865 - RNA, 20 nt, synthetic construct
  source 1..20: mol_type = other RNA
cccctactacttaatggttc

SEQ ID NO: 866 - RNA, 20 nt, synthetic construct
  source 1..20: mol_type = other RNA
acatttttctcccctactac

SEQ ID NO: 867 - RNA, 20 nt, synthetic construct
  source 1..20: mol_type = other RNA
ttaaaacctgataaagaatt

SEQ ID NO: 868 - RNA, 20 nt, synthetic construct
  source 1..20: mol_type = other RNA
ttatcaggttttaaagaata

SEQ ID NO: 869 - RNA, 20 nt, synthetic construct
  source 1..20: mol_type = other RNA
tattttattttaatcaagac

SEQ ID NO: 870 - RNA, 20 nt, synthetic construct
  source 1..20: mol_type = other RNA
acagtaaattaagtagaaaa

SEQ ID NO: 871 - RNA, 20 nt, synthetic construct
  source 1..20: mol_type = other RNA
acttaatttactgtggaagc

SEQ ID NO: 872 - RNA, 20 nt, synthetic construct
  source 1..20: mol_type = other RNA
tgtttattaatttttgcatc

SEQ ID NO: 873 - RNA, 20 nt, synthetic construct
  source 1..20: mol_type = other RNA
tttgtttgctgtttattctc

SEQ ID NO: 874 - RNA, 20 nt, synthetic construct
  source 1..20: mol_type = other RNA
ctgctagattttgtttatgt

SEQ ID NO: 875 - RNA, 20 nt, synthetic construct
  source 1..20: mol_type = other RNA
tcatcttggccaggctggtt

SEQ ID NO: 876 - RNA, 20 nt, synthetic construct
  source 1..20: mol_type = other RNA
ctgcctcagcctcccaagta

SEQ ID NO: 877 - RNA, 20 nt, synthetic construct
  source 1..20: mol_type = other RNA
agctgttctctgcctcagcc

SEQ ID NO: 878 - RNA, 20 nt, synthetic construct
  source 1..20: mol_type = other RNA
agatagatgaaacaaaggat

SEQ ID NO: 879 - RNA, 20 nt, synthetic construct
  source 1..20: mol_type = other RNA
taagctacctttgtcaggtc

SEQ ID NO: 880 - RNA, 20 nt, synthetic construct
  source 1..20: mol_type = other RNA
tgcggacctgacaaaggtag

SEQ ID NO: 881 - RNA, 20 nt, synthetic construct
  source 1..20: mol_type = other RNA
tgatacgttaagtgtgttga

SEQ ID NO: 882 - RNA, 20 nt, synthetic construct
  source 1..20: mol_type = other RNA
gggctctctctccctgagta

SEQ ID NO: 883 - RNA, 20 nt, synthetic construct
  source 1..20: mol_type = other RNA
tacccttttgctggcatgcc

SEQ ID NO: 884 - RNA, 20 nt, synthetic construct
  source 1..20: mol_type = other RNA
taccagtcagtctctggtct

SEQ ID NO: 885 - RNA, 20 nt, synthetic construct
  source 1..20: mol_type = other RNA
ctctgtgcaaactggttaaa

SEQ ID NO: 886 - RNA, 20 nt, synthetic construct
  source 1..20: mol_type = other RNA
gacaaaatattttatttaag

SEQ ID NO: 887 - RNA, 20 nt, synthetic construct
  source 1..20: mol_type = other RNA
tgtgacgtgagtaattcttg

SEQ ID NO: 888 - RNA, 20 nt, synthetic construct
  source 1..20: mol_type = other RNA
tgggaaataaagatgatttt

SEQ ID NO: 889 - RNA, 20 nt, synthetic construct
  source 1..20: mol_type = other RNA
caagaattactcacgtcaca

SEQ ID NO: 890 - RNA, 20 nt, synthetic construct
  source 1..20: mol_type = other RNA
actaataatcattaaaatca

SEQ ID NO: 891 - RNA, 20 nt, synthetic construct
  source 1..20: mol_type = other RNA
aaatgtaaatatgtggtcca

SEQ ID NO: 892 - RNA, 20 nt, synthetic construct
  source 1..20: mol_type = other RNA
aatattaggtttgctatatg

SEQ ID NO: 893 - RNA, 20 nt, synthetic construct
  source 1..20: mol_type = other RNA
ttggcttttgaaaattgttt

SEQ ID NO: 894 - RNA, 20 nt, synthetic construct
  source 1..20: mol_type = other RNA
aaagccaaagaagcagctta

SEQ ID NO: 895 - RNA, 20 nt, synthetic construct
  source 1..20: mol_type = other RNA
ggttgataaaagctttccca

SEQ ID NO: 896 - RNA, 20 nt, synthetic construct
  source 1..20: mol_type = other RNA
catgcaagagggctgatgtt

SEQ ID NO: 897 - RNA, 20 nt, synthetic construct
  source 1..20: mol_type = other RNA
ctgggtaaagaaagcttttt

SEQ ID NO: 898 - RNA, 20 nt, synthetic construct
  source 1..20: mol_type = other RNA
ttacccagtgaaaacacact

SEQ ID NO: 899 - RNA, 20 nt, synthetic construct
  source 1..20: mol_type = other RNA
ttgttaatccactacaactg

SEQ ID NO: 900 - RNA, 20 nt, synthetic construct
  source 1..20: mol_type = other RNA
ttaagtcaacctttgatcta

SEQ ID NO: 901 - RNA, 20 nt, synthetic construct
  source 1..20: mol_type = other RNA
tacccaaggtacccataaac

SEQ ID NO: 902 - RNA, 20 nt, synthetic construct
  source 1..20: mol_type = other RNA
gagtatgcttcttacccaag

SEQ ID NO: 903 - RNA, 20 nt, synthetic construct
  source 1..20: mol_type = other RNA
tggtattatcctcccaatag

SEQ ID NO: 904 - RNA, 20 nt, synthetic construct
  source 1..20: mol_type = other RNA
ctcaaaggttttaaatgctt

SEQ ID NO: 905 - RNA, 20 nt, synthetic construct
  source 1..20: mol_type = other RNA
ttaaagtcttagcacaagtg

SEQ ID NO: 906 - RNA, 20 nt, synthetic construct
  source 1..20: mol_type = other RNA
agaacagaccaggttttgtt

SEQ ID NO: 907 - RNA, 20 nt, synthetic construct
  source 1..20: mol_type = other RNA
agaatctgtgtttccttaaa

SEQ ID NO: 908 - RNA, 20 nt, synthetic construct
  source 1..20: mol_type = other RNA
cctgcaaatctctatagcaa

SEQ ID NO: 909 - RNA, 20 nt, synthetic construct
  source 1..20: mol_type = other RNA
tgacaacagaggtatccacc

SEQ ID NO: 910 - RNA, 20 nt, synthetic construct
  source 1..20: mol_type = other RNA
gggggtggatacctctgttg

SEQ ID NO: 911 - RNA, 20 nt, synthetic construct
  source 1..20: mol_type = other RNA
cattaaatcttttagccaaa

SEQ ID NO: 912 - RNA, 20 nt, synthetic construct
  source 1..20: mol_type = other RNA
tttcttctctcctagagacc

SEQ ID NO: 913 - RNA, 20 nt, synthetic construct
  source 1..20: mol_type = other RNA
tctctcctagagaccaccaa

SEQ ID NO: 914 - RNA, 20 nt, synthetic construct
  source 1..20: mol_type = other RNA
ctcctagagaccaccaagtt

SEQ ID NO: 915 - RNA, 20 nt, synthetic construct
  source 1..20: mol_type = other RNA
tgggaggcagagggaccaat

SEQ ID NO: 916 - RNA, 20 nt, synthetic construct
  source 1..20: mol_type = other RNA
tctgtaagagatgtgatccc

SEQ ID NO: 917 - RNA, 20 nt, synthetic construct
  source 1..20: mol_type = other RNA
tgcctcatttcctctgtaag

SEQ ID NO: 918 - RNA, 20 nt, synthetic construct
  source 1..20: mol_type = other RNA
ctgcctccagaccctatttt

SEQ ID NO: 919 - RNA, 20 nt, synthetic construct
  source 1..20: mol_type = other RNA
cgcttcagctatgacaggaa

SEQ ID NO: 920 - RNA, 20 nt, synthetic construct
  source 1..20: mol_type = other RNA
gctatgacaggaaatatcct

SEQ ID NO: 921 - RNA, 20 nt, synthetic construct
  source 1..20: mol_type = other RNA
ttgtcaataaaatttcttca

SEQ ID NO: 922 - RNA, 20 nt, synthetic construct
  source 1..20: mol_type = other RNA
tcattctttcttcactttgt

SEQ ID NO: 923 - RNA, 20 nt, synthetic construct
  source 1..20: mol_type = other RNA
ttctttcttcactttgtttg

SEQ ID NO: 924 - RNA, 20 nt, synthetic construct
  source 1..20: mol_type = other RNA
ttcttcactttgtttgtgtg

SEQ ID NO: 925 - RNA, 20 nt, synthetic construct
  source 1..20: mol_type = other RNA
tcactttgtttgtgtgtttt

SEQ ID NO: 926 - RNA, 20 nt, synthetic construct
  source 1..20: mol_type = other RNA
ctttgtttgtgtgttttgtc

SEQ ID NO: 927 - RNA, 20 nt, synthetic construct
  source 1..20: mol_type = other RNA
ttgttcaagatgccaaggac

SEQ ID NO: 928 - RNA, 20 nt, synthetic construct
  source 1..20: mol_type = other RNA
agatgccaaggacctggaca

SEQ ID NO: 929 - RNA, 20 nt, synthetic construct
  source 1..20: mol_type = other RNA
ttaaggggtttagatggtgc

SEQ ID NO: 930 - RNA, 20 nt, synthetic construct
  source 1..20: mol_type = other RNA
gccctctgaggctgtgcacc

SEQ ID NO: 931 - RNA, 20 nt, synthetic construct
  source 1..20: mol_type = other RNA
agaaacagctctcaacacca

SEQ ID NO: 932 - RNA, 20 nt, synthetic construct
  source 1..20: mol_type = other RNA
agaagctcagcctagtgtct

SEQ ID NO: 933 - RNA, 20 nt, synthetic construct
  source 1..20: mol_type = other RNA
tcccctttcgttctgcctcg

SEQ ID NO: 934 - RNA, 20 nt, synthetic construct
  source 1..20: mol_type = other RNA
cctttcgttctgcctcgaat

SEQ ID NO: 935 - RNA, 20 nt, synthetic construct
  source 1..20: mol_type = other RNA
ttctgcctcgaatgtctgga

SEQ ID NO: 936 - RNA, 20 nt, synthetic construct
  source 1..20: mol_type = other RNA
gcctcgaatgtctggagctg

SEQ ID NO: 937 - RNA, 20 nt, synthetic construct
  source 1..20: mol_type = other RNA
aggcagaacgaaaggggaag

SEQ ID NO: 938 - RNA, 20 nt, synthetic construct
  source 1..20: mol_type = other RNA
tcctcacgctgacacgatgg

SEQ ID NO: 939 - RNA, 20 nt, synthetic construct
  source 1..20: mol_type = other RNA
ttggcctttcatcctcacgc

SEQ ID NO: 940 - RNA, 20 nt, synthetic construct
  source 1..20: mol_type = other RNA
caaatagacttttaagtctt

SEQ ID NO: 941 - RNA, 20 nt, synthetic construct
  source 1..20: mol_type = other RNA
atatcccctcttgaagctga

SEQ ID NO: 942 - RNA, 20 nt, synthetic construct
  source 1..20: mol_type = other RNA
agaggggatatggaagactt

SEQ ID NO: 943 - RNA, 20 nt, synthetic construct
  source 1..20: mol_type = other RNA
gcttcaagaggggatatgga

SEQ ID NO: 944 - RNA, 20 nt, synthetic construct
  source 1..20: mol_type = other RNA
ataagaacaaacaacgctgc

SEQ ID NO: 945 - RNA, 20 nt, synthetic construct
  source 1..20: mol_type = other RNA
tatggaaatttcagcttcaa

SEQ ID NO: 946 - RNA, 20 nt, synthetic construct
  source 1..20: mol_type = other RNA
ctggggcagaggggagcttt

SEQ ID NO: 947 - RNA, 20 nt, synthetic construct
  source 1..20: mol_type = other RNA
aggagtctaagaagaggggc

SEQ ID NO: 948 - RNA, 20 nt, synthetic construct
  source 1..20: mol_type = other RNA
tagactcctagaaagctccc

SEQ ID NO: 949 - RNA, 20 nt, synthetic construct
  source 1..20: mol_type = other RNA
gagcccaatcagggggtcag

SEQ ID NO: 950 - RNA, 20 nt, synthetic construct
  source 1..20: mol_type = other RNA
ccactgaccccctgattggg

SEQ ID NO: 951 - RNA, 20 nt, synthetic construct
  source 1..20: mol_type = other RNA
cagccgtgctctcagagatc

SEQ ID NO: 952 - RNA, 20 nt, synthetic construct
  source 1..20: mol_type = other RNA
tctaattctcagccgtgctc

SEQ ID NO: 953 - RNA, 20 nt, synthetic construct
  source 1..20: mol_type = other RNA
aacagtcagcggcatggtga

SEQ ID NO: 954 - RNA, 20 nt, synthetic construct
  source 1..20: mol_type = other RNA
aacgtttcctctaattctca

SEQ ID NO: 955 - RNA, 20 nt, synthetic construct
  source 1..20: mol_type = other RNA
tgaggaggtgttcccaaatc

SEQ ID NO: 956 - RNA, 20 nt, synthetic construct
  source 1..20: mol_type = other RNA
cactgctgccaagccatccc

SEQ ID NO: 957 - RNA, 20 nt, synthetic construct
  source 1..20: mol_type = other RNA
actgccatgtcccttgccca

SEQ ID NO: 958 - RNA, 20 nt, synthetic construct
  source 1..20: mol_type = other RNA
ttccactgccatgtcccttg

SEQ ID NO: 959 - RNA, 20 nt, synthetic construct
  source 1..20: mol_type = other RNA
tggtatattggtttcactct

SEQ ID NO: 960 - RNA, 20 nt, synthetic construct
  source 1..20: mol_type = other RNA
ggtgagaattctgatggtat

SEQ ID NO: 961 - RNA, 20 nt, synthetic construct
  source 1..20: mol_type = other RNA
cacctgaagttttgtgtttt

SEQ ID NO: 962 - RNA, 20 nt, synthetic construct
  source 1..20: mol_type = other RNA
gatggtattgagtcaaggta

SEQ ID NO: 963 - RNA, 20 nt, synthetic construct
  source 1..20: mol_type = other RNA
agcgattcttttgcctcagc

SEQ ID NO: 964 - RNA, 20 nt, synthetic construct
  source 1..20: mol_type = other RNA
tttgcctcagcctcctgagt

SEQ ID NO: 965 - RNA, 20 nt, synthetic construct
  source 1..20: mol_type = other RNA
tattgtgtagaaacccttag

SEQ ID NO: 966 - RNA, 20 nt, synthetic construct
  source 1..20: mol_type = other RNA
acacaatatgaagccttata

SEQ ID NO: 967 - RNA, 20 nt, synthetic construct
  source 1..20: mol_type = other RNA
cagcccacctaaaaagccca

SEQ ID NO: 968 - RNA, 20 nt, synthetic construct
  source 1..20: mol_type = other RNA
attattttaaatataaaaat

SEQ ID NO: 969 - RNA, 20 nt, synthetic construct
  source 1..20: mol_type = other RNA
ccagctctgggaagccacag

SEQ ID NO: 970 - RNA, 20 nt, synthetic construct
  source 1..20: mol_type = other RNA
cagagctggagaaaacttgg

SEQ ID NO: 971 - RNA, 20 nt, synthetic construct
  source 1..20: mol_type = other RNA
aaagaacaatctggaagctt

SEQ ID NO: 972 - RNA, 20 nt, synthetic construct
  source 1..20: mol_type = other RNA
ttggaacatttggaggtccc

SEQ ID NO: 973 - RNA, 20 nt, synthetic construct
  source 1..20: mol_type = other RNA
agattgttctttggaacatt

SEQ ID NO: 974 - RNA, 20 nt, synthetic construct
  source 1..20: mol_type = other RNA
acagtgattgagaggagaca

SEQ ID NO: 975 - RNA, 20 nt, synthetic construct
  source 1..20: mol_type = other RNA
ggcctgtcaccatacttggg

SEQ ID NO: 976 - RNA, 20 nt, synthetic construct
  source 1..20: mol_type = other RNA
agttctgagactctatgctg

SEQ ID NO: 977 - RNA, 20 nt, synthetic construct
  source 1..20: mol_type = other RNA
cgatctgtaaaaagtcggat

SEQ ID NO: 978 - RNA, 20 nt, synthetic construct
  source 1..20: mol_type = other RNA
agggctgccctcccagaaca

SEQ ID NO: 979 - RNA, 20 nt, synthetic construct
  source 1..20: mol_type = other RNA
gggagggcagccctggaact

SEQ ID NO: 980 - RNA, 20 nt, synthetic construct
  source 1..20: mol_type = other RNA
gcggctgctgttctgggagg

SEQ ID NO: 981 - RNA, 20 nt, synthetic construct
  source 1..20: mol_type = other RNA
aaggaaggcaaagccttgag

SEQ ID NO: 982 - RNA, 20 nt, synthetic construct
  source 1..20: mol_type = other RNA
ttggaatacattttttgccc

SEQ ID NO: 983 - RNA, 20 nt, synthetic construct
  source 1..20: mol_type = other RNA
aatccatttcttacccacag

SEQ ID NO: 984 - RNA, 20 nt, synthetic construct
  source 1..20: mol_type = other RNA
tacccacagactgtcatttc

SEQ ID NO: 985 - RNA, 20 nt, synthetic construct
  source 1..20: mol_type = other RNA
ttttttagagcataaactca

SEQ ID NO: 986 - RNA, 20 nt, synthetic construct
  source 1..20: mol_type = other RNA
ctccatgaataggctgtctc

SEQ ID NO: 987 - RNA, 20 nt, synthetic construct
  source 1..20: mol_type = other RNA
tggagagaagtagctgcgtc

SEQ ID NO: 988 - RNA, 20 nt, synthetic construct
  source 1..20: mol_type = other RNA
gtgcctgggagacagcctat

SEQ ID NO: 989 - RNA, 20 nt, synthetic construct
  source 1..20: mol_type = other RNA
aggaaccagcagggcctttc

SEQ ID NO: 990 - RNA, 20 nt, synthetic construct
  source 1..20: mol_type = other RNA
tggaattctgtgcctgggag

SEQ ID NO: 991 - RNA, 20 nt, synthetic construct
  source 1..20: mol_type = other RNA
aggttggtttcaagggaaga

SEQ ID NO: 992 - RNA, 20 nt, synthetic construct
  source 1..20: mol_type = other RNA
agggaagagtgtgtcccttg

SEQ ID NO: 993 - RNA, 20 nt, synthetic construct
  source 1..20: mol_type = other RNA
cttgaaaccaaccttgaaag

SEQ ID NO: 994 - RNA, 20 nt, synthetic construct
  source 1..20: mol_type = other RNA
ggctcttggagctggctcca

SEQ ID NO: 995 - RNA, 20 nt, synthetic construct
  source 1..20: mol_type = other RNA
tgttgggtccagagttgcat

SEQ ID NO: 996 - RNA, 20 nt, synthetic construct
  source 1..20: mol_type = other RNA
gtgatcttggttatttgaat

SEQ ID NO: 997 - RNA, 20 nt, synthetic construct
  source 1..20: mol_type = other RNA
aataaccaagatcacagaac

SEQ ID NO: 998 - RNA, 20 nt, synthetic construct
  source 1..20: mol_type = other RNA
ctgagcctcagtttcctcaa

SEQ ID NO: 999 - RNA, 20 nt, synthetic construct
  source 1..20: mol_type = other RNA
tcaatccttaggtggaaata

SEQ ID NO: 1000 - RNA, 20 nt, synthetic construct
  source 1..20: mol_type = other RNA
acctaaggattgaggaaact

SEQ ID NO: 1001 - RNA, 20 nt, synthetic construct
  source 1..20: mol_type = other RNA
taccttatccagaatcagtt

SEQ ID NO: 1002 - RNA, 20 nt, synthetic construct
  source 1..20: mol_type = other RNA
tctacagaattcctcttgcc

SEQ ID NO: 1003 - RNA, 20 nt, synthetic construct
  source 1..20: mol_type = other RNA
ttctaacatcgtagcacaaa

SEQ ID NO: 1004 - RNA, 20 nt, synthetic construct
  source 1..20: mol_type = other RNA
aacatcgtagcacaaaagta

SEQ ID NO: 1005 - RNA, 20 nt, synthetic construct
  source 1..20: mol_type = other RNA
ttacatactacttttgtgct

SEQ ID NO: 1006 - RNA, 20 nt, synthetic construct
  source 1..20: mol_type = other RNA
aataaaactttttagaggct

SEQ ID NO: 1007 - RNA, 20 nt, synthetic construct
  source 1..20: mol_type = other RNA
gatttgctacgtgacttcag

SEQ ID NO: 1008 - RNA, 20 nt, synthetic construct
  source 1..20: mol_type = other RNA
ggcaactcactttccttttc

SEQ ID NO: 1009 - RNA, 20 nt, synthetic construct
  source 1..20: mol_type = other RNA
ttttctgggcctataaatca

SEQ ID NO: 1010 - RNA, 20 nt, synthetic construct
  source 1..20: mol_type = other RNA
gggcctataaatcaaagcag

SEQ ID NO: 1011 - RNA, 20 nt, synthetic construct
  source 1..20: mol_type = other RNA
ttgttgggggtgctgtcctg

SEQ ID NO: 1012 - RNA, 20 nt, synthetic construct
  source 1..20: mol_type = other RNA
agtagcaacctacaatgcac

SEQ ID NO: 1013 - RNA, 20 nt, synthetic construct
  source 1..20: mol_type = other RNA
ctacccgcttgaggcagaag

SEQ ID NO: 1014 - RNA, 20 nt, synthetic construct
  source 1..20: mol_type = other RNA
gcctcaagcgggtagggaag

SEQ ID NO: 1015 - RNA, 20 nt, synthetic construct
  source 1..20: mol_type = other RNA
tctgagtcgcccagccgagc

SEQ ID NO: 1016 - RNA, 20 nt, synthetic construct
  source 1..20: mol_type = other RNA
gagtcgcccagccgagccag

SEQ ID NO: 1017 - RNA, 20 nt, synthetic construct
  source 1..20: mol_type = other RNA
ctggctcggctgggcgactc

SEQ ID NO: 1018 - RNA, 20 nt, synthetic construct
  source 1..20: mol_type = other RNA
gagtgtgcttgtttagagag

SEQ ID NO: 1019 - RNA, 20 nt, synthetic construct
  source 1..20: mol_type = other RNA
caaatagagccattgtgtca

SEQ ID NO: 1020 - RNA, 20 nt, synthetic construct
  source 1..20: mol_type = other RNA
agggcctgagcttccagcct

SEQ ID NO: 1021 - RNA, 20 nt, synthetic construct
  source 1..20: mol_type = other RNA
agcctggcccagggattcag

SEQ ID NO: 1022 - RNA, 20 nt, synthetic construct
  source 1..20: mol_type = other RNA
ggttgaagcagggcccgagg

SEQ ID NO: 1023 - RNA, 20 nt, synthetic construct
  source 1..20: mol_type = other RNA
acctgaatccctgggccagg

SEQ ID NO: 1024 - RNA, 20 nt, synthetic construct
  source 1..20: mol_type = other RNA
acccacctggggcagggcca

SEQ ID NO: 1025 - RNA, 20 nt, synthetic construct
  source 1..20: mol_type = other RNA
ccctcctttacgggcactca

SEQ ID NO: 1026 - RNA, 20 nt, synthetic construct
  source 1..20: mol_type = other RNA
taagcagctaggattacaag

SEQ ID NO: 1027 - RNA, 20 nt, synthetic construct
  source 1..20: mol_type = other RNA
cctgcctcagcttcctaagc

SEQ ID NO: 1028 - RNA, 20 nt, synthetic construct
  source 1..20: mol_type = other RNA
agtgattctcctgcctcagc

SEQ ID NO: 1029 - RNA, 20 nt, synthetic construct
  source 1..20: mol_type = other RNA
ttattattataggtcaggga

SEQ ID NO: 1030 - RNA, 20 nt, synthetic construct
  source 1..20: mol_type = other RNA
attgtgcagtggttgttttc

SEQ ID NO: 1031 - RNA, 20 nt, synthetic construct
  source 1..20: mol_type = other RNA
tccagtggacattgaccttc

SEQ ID NO: 1032 - RNA, 20 nt, synthetic construct
  source 1..20: mol_type = other RNA
ccaccccaaccgtcccccag

SEQ ID NO: 1033 - RNA, 20 nt, synthetic construct
  source 1..20: mol_type = other RNA
atgtggatcccccacagcag

SEQ ID NO: 1034 - RNA, 20 nt, synthetic construct
  source 1..20: mol_type = other RNA
cacatggggtcggggtcatt

SEQ ID NO: 1035 - RNA, 20 nt, synthetic construct
  source 1..20: mol_type = other RNA
cagcttaactcctcccgggc

SEQ ID NO: 1036 - RNA, 20 nt, synthetic construct
  source 1..20: mol_type = other RNA
aaaaacaaaacacacaagca

SEQ ID NO: 1037 - RNA, 20 nt, synthetic construct
  source 1..20: mol_type = other RNA
cagaagcaggtttctcctct

SEQ ID NO: 1038 - RNA, 20 nt, synthetic construct
  source 1..20: mol_type = other RNA
gggaaaaaaaattcaaaaaa

SEQ ID NO: 1039 - RNA, 20 nt, synthetic construct
  source 1..20: mol_type = other RNA
cctcttgacagcctctccta

SEQ ID NO: 1040 - RNA, 20 nt, synthetic construct
  source 1..20: mol_type = other RNA
tgtagggagcaaaaaattct

SEQ ID NO: 1041 - RNA, 20 nt, synthetic construct
  source 1..20: mol_type = other RNA
caggaagagaactgcaggta

SEQ ID NO: 1042 - RNA, 20 nt, synthetic construct
  source 1..20: mol_type = other RNA
tgtgaatctgtccagggggc

SEQ ID NO: 1043 - RNA, 20 nt, synthetic construct
  source 1..20: mol_type = other RNA
cttcctgtgaatctgtccag

SEQ ID NO: 1044 - RNA, 20 nt, synthetic construct
  source 1..20: mol_type = other RNA
aaagggcatgttaccaaatg

SEQ ID NO: 1045 - RNA, 20 nt, synthetic construct
  source 1..20: mol_type = other RNA
cctactgcatcttgaacatt

SEQ ID NO: 1046 - RNA, 20 nt, synthetic construct
  source 1..20: mol_type = other RNA
agatgcagtaggtgaaactt

SEQ ID NO: 1047 - RNA, 20 nt, synthetic construct
  source 1..20: mol_type = other RNA
aagtggggcttgcccagcca

SEQ ID NO: 1048 - RNA, 20 nt, synthetic construct
  source 1..20: mol_type = other RNA
gtgatcacaaatcccttcca

SEQ ID NO: 1049 - RNA, 20 nt, synthetic construct
  source 1..20: mol_type = other RNA
agtccctgtacctgtaactt

SEQ ID NO: 1050 - RNA, 20 nt, synthetic construct
  source 1..20: mol_type = other RNA
aggctgtccattgtaccttc

SEQ ID NO: 1051 - RNA, 20 nt, synthetic construct
  source 1..20: mol_type = other RNA
gcctcctacatctgtgtgat

SEQ ID NO: 1052 - RNA, 20 nt, synthetic construct
  source 1..20: mol_type = other RNA
ctgtgtccagatgtgtgacg

SEQ ID NO: 1053 - RNA, 20 nt, synthetic construct
  source 1..20: mol_type = other RNA
ggtggccgggacgctctgct

SEQ ID NO: 1054 - RNA, 20 nt, synthetic construct
  source 1..20: mol_type = other RNA
cttggtggagcgaaggggat

SEQ ID NO: 1055 - RNA, 20 nt, synthetic construct
  source 1..20: mol_type = other RNA
ctccaccaagcgaagcagag

SEQ ID NO: 1056 - RNA, 20 nt, synthetic construct
  source 1..20: mol_type = other RNA
tctgctgcggtgcaggtggc

SEQ ID NO: 1057 - RNA, 20 nt, synthetic construct
  source 1..20: mol_type = other RNA
ctgaggactccacagtgagg

SEQ ID NO: 1058 - RNA, 20 nt, synthetic construct
  source 1..20: mol_type = other RNA
ccatgtctttaaaagccatg

SEQ ID NO: 1059 - RNA, 20 nt, synthetic construct
  source 1..20: mol_type = other RNA
tgggtttctccatgtcttta

SEQ ID NO: 1060 - RNA, 20 nt, synthetic construct
  source 1..20: mol_type = other RNA
tggaggaggtggcagctgag

SEQ ID NO: 1061 - RNA, 20 nt, synthetic construct
  source 1..20: mol_type = other RNA
gtcccataccaagctgagct

SEQ ID NO: 1062 - RNA, 20 nt, synthetic construct
  source 1..20: mol_type = other RNA
tcatttgaaatgaaaaggac

SEQ ID NO: 1063 - RNA, 20 nt, synthetic construct
  source 1..20: mol_type = other RNA
aatgaggaagttaaagctta

SEQ ID NO: 1064 - RNA, 20 nt, synthetic construct
  source 1..20: mol_type = other RNA
tttcaaatgaggaagttaaa

SEQ ID NO: 1065 - RNA, 20 nt, synthetic construct
  source 1..20: mol_type = other RNA
tgctcccaggcacctcagtc

SEQ ID NO: 1066 - RNA, 20 nt, synthetic construct
  source 1..20: mol_type = other RNA
gacctagagttacccacagc

SEQ ID NO: 1067 - RNA, 20 nt, synthetic construct
  source 1..20: mol_type = other RNA
gagaactgacggtgccacag

SEQ ID NO: 1068 - RNA, 20 nt, synthetic construct
  source 1..20: mol_type = other RNA
ctgaatagcacccagcatac

SEQ ID NO: 1069 - RNA, 20 nt, synthetic construct
  source 1..20: mol_type = other RNA
tgagggcagggattttgtct

SEQ ID NO: 1070 - RNA, 20 nt, synthetic construct
  source 1..20: mol_type = other RNA
gtcaccttagtgaccagctg

SEQ ID NO: 1071 - RNA, 20 nt, synthetic construct
  source 1..20: mol_type = other RNA
catctgccctctaagcaaac

SEQ ID NO: 1072 - RNA, 20 nt, synthetic construct
  source 1..20: mol_type = other RNA
tgctgtgggcagaactcacc

SEQ ID NO: 1073 - RNA, 20 nt, synthetic construct
  source 1..20: mol_type = other RNA
gcccacagcaggaagtttgc

SEQ ID NO: 1074 - RNA, 20 nt, synthetic construct
  source 1..20: mol_type = other RNA
cctcatccgtaaaatgagga

SEQ ID NO: 1075 - RNA, 20 nt, synthetic construct
  source 1..20: mol_type = other RNA
gagaaggtgtaaatgtggtc

SEQ ID NO: 1076 - RNA, 20 nt, synthetic construct
  source 1..20: mol_type = other RNA
ctgaacctctttctcctcat

SEQ ID NO: 1077 - RNA, 20 nt, synthetic construct
  source 1..20: mol_type = other RNA
aggaggaatattctctgtcc

SEQ ID NO: 1078 - RNA, 20 nt, synthetic construct
  source 1..20: mol_type = other RNA
tcctggaaggaggcaagttg

SEQ ID NO: 1079 - RNA, 20 nt, synthetic construct
  source 1..20: mol_type = other RNA
ctgtcctgccctcatctgca

SEQ ID NO: 1080 - RNA, 20 nt, synthetic construct
  source 1..20: mol_type = other RNA
aatccaggatcccatcaatc

SEQ ID NO: 1081 - RNA, 20 nt, synthetic construct
  source 1..20: mol_type = other RNA
gttcctgcaggacccccaaa

SEQ ID NO: 1082 - RNA, 20 nt, synthetic construct
  source 1..20: mol_type = other RNA
tgcaggacccccaaagtggt

SEQ ID NO: 1083 - RNA, 20 nt, synthetic construct
  source 1..20: mol_type = other RNA
tcgtaagtggggatgtcaac

SEQ ID NO: 1084 - RNA, 20 nt, synthetic construct
  source 1..20: mol_type = other RNA
cagtggccgaggggccccca

SEQ ID NO: 1085 - RNA, 20 nt, synthetic construct
  source 1..20: mol_type = other RNA
tccgtagggtatgcaggtgg

SEQ ID NO: 1086 - RNA, 20 nt, synthetic construct
  source 1..20: mol_type = other RNA
gcggagacgacaccgagtgc

SEQ ID NO: 1087 - RNA, 20 nt, synthetic construct
  source 1..20: mol_type = other RNA
tcccaggctcaagagatcct

SEQ ID NO: 1088 - RNA, 20 nt, synthetic construct
  source 1..20: mol_type = other RNA
tctctctgccttagcctcct

SEQ ID NO: 1089 - RNA, 20 nt, synthetic construct
  source 1..20: mol_type = other RNA
cattttacagatgaggaggc

SEQ ID NO: 1090 - RNA, 20 nt, synthetic construct
  source 1..20: mol_type = other RNA
ctcaaagagctgatttgtga

SEQ ID NO: 1091 - RNA, 20 nt, synthetic construct
  source 1..20: mol_type = other RNA
ataatgaaagcccaggccag

SEQ ID NO: 1092 - RNA, 20 nt, synthetic construct
  source 1..20: mol_type = other RNA
ttattgaaagtgagctggga

SEQ ID NO: 1093 - RNA, 20 nt, synthetic construct
  source 1..20: mol_type = other RNA
cacctacacctccaggctcc

SEQ ID NO: 1094 - RNA, 20 nt, synthetic construct
  source 1..20: mol_type = other RNA
gtgcctgcccagtaaagtgg

SEQ ID NO: 1095 - RNA, 20 nt, synthetic construct
  source 1..20: mol_type = other RNA
agttaggccacagatgagtg

SEQ ID NO: 1096 - RNA, 20 nt, synthetic construct
  source 1..20: mol_type = other RNA
tgatgctggtgaccttgagc

SEQ ID NO: 1097 - RNA, 20 nt, synthetic construct
  source 1..20: mol_type = other RNA
ggactttgcccaaatgtcgc

SEQ ID NO: 1098 - RNA, 20 nt, synthetic construct
  source 1..20: mol_type = other RNA
tcaggactttgcccaaatgt

SEQ ID NO: 1099 - RNA, 20 nt, synthetic construct
  source 1..20: mol_type = other RNA
tgtagctgcatggctccctc

SEQ ID NO: 1100 - RNA, 20 nt, synthetic construct
  source 1..20: mol_type = other RNA
tcctgtagctgcatggctcc

SEQ ID NO: 1101 - RNA, 20 nt, synthetic construct
  source 1..20: mol_type = other RNA
gcctggagtgctgttcttcc

SEQ ID NO: 1102 - RNA, 20 nt, synthetic construct
  source 1..20: mol_type = other RNA
ttctgcctggagtgctgttc

SEQ ID NO: 1103 - RNA, 20 nt, synthetic construct
  source 1..20: mol_type = other RNA
aggaacagcatggggccagg

SEQ ID NO: 1104 - RNA, 20 nt, synthetic construct
  source 1..20: mol_type = other RNA
tggaacacgcatgcatccca

SEQ ID NO: 1105 - RNA, 20 nt, synthetic construct
  source 1..20: mol_type = other RNA
ggttagcaagccccgtcacc

SEQ ID NO: 1106 - RNA, 20 nt, synthetic construct
  source 1..20: mol_type = other RNA
tccccaggcctgcccctccc

SEQ ID NO: 1107 - RNA, 20 nt, synthetic construct
  source 1..20: mol_type = other RNA
cctgccccgtcagaactcca

SEQ ID NO: 1108 - RNA, 20 nt, synthetic construct
  source 1..20: mol_type = other RNA
ctccctgcctcggggtgtca

SEQ ID NO: 1109 - RNA, 20 nt, synthetic construct
  source 1..20: mol_type = other RNA
ggatccttgcgagcgggctc

SEQ ID NO: 1110 - RNA, 20 nt, synthetic construct
  source 1..20: mol_type = other RNA
tcgtccagcagagggcgcgc

SEQ ID NO: 1111 - RNA, 20 nt, synthetic construct
  source 1..20: mol_type = other RNA
tcgcctgtgaaatgcgggcg

SEQ ID NO: 1112 - RNA, 20 nt, synthetic construct
  source 1..20: mol_type = other RNA
caggcgaggaaaccgagcct

SEQ ID NO: 1113 - RNA, 20 nt, synthetic construct
  source 1..20: mol_type = other RNA
cccggggtcagcggctgggc

SEQ ID NO: 1114 - RNA, 20 nt, synthetic construct
  source 1..20: mol_type = other RNA
cacgctatgcaccacccagt

SEQ ID NO: 1115 - RNA, 20 nt, synthetic construct
  source 1..20: mol_type = other RNA
cattcacacgctatgcacca

SEQ ID NO: 1116 - RNA, 20 nt, synthetic construct
  source 1..20: mol_type = other RNA
tccatccccttcacattcac

SEQ ID NO: 1117 - RNA, 20 nt, synthetic construct
  source 1..20: mol_type = other RNA
cattttacagaggaggaaac

SEQ ID NO: 1118 - RNA, 20 nt, synthetic construct
  source 1..20: mol_type = other RNA
tcctctgtaaaatgggaata

SEQ ID NO: 1119 - RNA, 20 nt, synthetic construct
  source 1..20: mol_type = other RNA
gcagctgagagctgttagaa

SEQ ID NO: 1120 - RNA, 20 nt, synthetic construct
  source 1..20: mol_type = other RNA
agagctggaaggtgtgaggc

SEQ ID NO: 1121 - RNA, 20 nt, synthetic construct
  source 1..20: mol_type = other RNA
agctctagaaaacagggtac

SEQ ID NO: 1122 - RNA, 20 nt, synthetic construct
  source 1..20: mol_type = other RNA
cacacacactccaggccagc

SEQ ID NO: 1123 - RNA, 20 nt, synthetic construct
  source 1..20: mol_type = other RNA
ctctgggcccggctggcctg

SEQ ID NO: 1124 - RNA, 20 nt, synthetic construct
  source 1..20: mol_type = other RNA
acggacccacacccagccac

SEQ ID NO: 1125 - RNA, 20 nt, synthetic construct
  source 1..20: mol_type = other RNA
cgtcagccatggctgcctgg

SEQ ID NO: 1126 - RNA, 20 nt, synthetic construct
  source 1..20: mol_type = other RNA
ggatcggcttcattgtgctg

SEQ ID NO: 1127 - RNA, 20 nt, synthetic construct
  source 1..20: mol_type = other RNA
ttgtgctggggcttttcctg

SEQ ID NO: 1128 - RNA, 20 nt, synthetic construct
  source 1..20: mol_type = other RNA
tgctggccctcggtacgttc

SEQ ID NO: 1129 - RNA, 20 nt, synthetic construct
  source 1..20: mol_type = other RNA
tcatgagccatgatcggccc

SEQ ID NO: 1130 - RNA, 20 nt, synthetic construct
  source 1..20: mol_type = other RNA
atgccatgggcagcgtcatg

SEQ ID NO: 1131 - RNA, 20 nt, synthetic construct
  source 1..20: mol_type = other RNA
catcactaaattacacataa

SEQ ID NO: 1132 - RNA, 20 nt, synthetic construct
  source 1..20: mol_type = other RNA
agttcaagtcctgttccaaa

SEQ ID NO: 1133 - RNA, 20 nt, synthetic construct
  source 1..20: mol_type = other RNA
agtcctgttccaaactctct

SEQ ID NO: 1134 - RNA, 20 nt, synthetic construct
  source 1..20: mol_type = other RNA
aaactctctatgacctttgt

SEQ ID NO: 1135 - RNA, 20 nt, synthetic construct
  source 1..20: mol_type = other RNA
attccacagagctgttggga

SEQ ID NO: 1136 - RNA, 20 nt, synthetic construct
  source 1..20: mol_type = other RNA
caactcctggcatttccatt

SEQ ID NO: 1137 - RNA, 20 nt, synthetic construct
  source 1..20: mol_type = other RNA
atgcctagagaggctgggtg

SEQ ID NO: 1138 - RNA, 20 nt, synthetic construct
  source 1..20: mol_type = other RNA
aaggtcacacagctggtcag

SEQ ID NO: 1139 - RNA, 20 nt, synthetic construct
  source 1..20: mol_type = other RNA
ccctgggtctgtacctgacc

SEQ ID NO: 1140 - RNA, 20 nt, synthetic construct
  source 1..20: mol_type = other RNA
ctccttttctccctgggtct

SEQ ID NO: 1141 - RNA, 20 nt, synthetic construct
  source 1..20: mol_type = other RNA
gttcagtgctggagcggtct

SEQ ID NO: 1142 - RNA, 20 nt, synthetic construct
  source 1..20: mol_type = other RNA
gtgctggagcggtctgggct

SEQ ID NO: 1143 - RNA, 20 nt, synthetic construct
  source 1..20: mol_type = other RNA
ttgagcagaggtcactggga

SEQ ID NO: 1144 - RNA, 20 nt, synthetic construct
  source 1..20: mol_type = other RNA
cccagtgacctctgctcaag

SEQ ID NO: 1145 - RNA, 20 nt, synthetic construct
  source 1..20: mol_type = other RNA
ctcctcccctcccctcccct

SEQ ID NO: 1146 - RNA, 20 nt, synthetic construct
  source 1..20: mol_type = other RNA
tgggttcacgtgctgtggag

SEQ ID NO: 1147 - RNA, 20 nt, synthetic construct
  source 1..20: mol_type = other RNA
cgtgctgtggaggcagcgtg

SEQ ID NO: 1148 - RNA, 20 nt, synthetic construct
  source 1..20: mol_type = other RNA
aatccctgctccttcatgtc

SEQ ID NO: 1149 - RNA, 20 nt, synthetic construct
  source 1..20: mol_type = other RNA
tgtcccacttctgtgacctt

SEQ ID NO: 1150 - RNA, 20 nt, synthetic construct
  source 1..20: mol_type = other RNA
gtgaccttggcagaaagagt

SEQ ID NO: 1151 - RNA, 20 nt, synthetic construct
  source 1..20: mol_type = other RNA
gccaaggtcacagaagtggg

SEQ ID NO: 1152 - RNA, 20 nt, synthetic construct
  source 1..20: mol_type = other RNA
ctgtgaagcctgtttcctcc

SEQ ID NO: 1153 - RNA, 20 nt, synthetic construct
  source 1..20: mol_type = other RNA
ccaagcagagaagatgggga

SEQ ID NO: 1154 - RNA, 20 nt, synthetic construct
  source 1..20: mol_type = other RNA
ctgcttggtgaactcttatc

SEQ ID NO: 1155 - RNA, 20 nt, synthetic construct
  source 1..20: mol_type = other RNA
ccatcttctctgcttggtga

SEQ ID NO: 1156 - RNA, 20 nt, synthetic construct
  source 1..20: mol_type = other RNA
aggcagaagagtagcatgat

SEQ ID NO: 1157 - RNA, 20 nt, synthetic construct
  source 1..20: mol_type = other RNA
tctctggtcttggtgagagc

SEQ ID NO: 1158 - RNA, 20 nt, synthetic construct
  source 1..20: mol_type = other RNA
ctggtcttggtgagagctga

SEQ ID NO: 1159 - RNA, 20 nt, synthetic construct
  source 1..20: mol_type = other RNA
agatgactgtcagctctcac

SEQ ID NO: 1160 - RNA, 20 nt, synthetic construct
  source 1..20: mol_type = other RNA
gcattattccagatgactgt

SEQ ID NO: 1161 - RNA, 20 nt, synthetic construct
  source 1..20: mol_type = other RNA
aacacaaagctgtaggaact

SEQ ID NO: 1162 - RNA, 20 nt, synthetic construct
  source 1..20: mol_type = other RNA
gacacatgctacaacatcac

SEQ ID NO: 1163 - RNA, 20 nt, synthetic construct
  source 1..20: mol_type = other RNA
atccttaaggctgaatagta

SEQ ID NO: 1164 - RNA, 20 nt, synthetic construct
  source 1..20: mol_type = other RNA
gccttaaggatggaacttct

SEQ ID NO: 1165 - RNA, 20 nt, synthetic construct
  source 1..20: mol_type = other RNA
tcatatggatagactatatt

SEQ ID NO: 1166 - RNA, 20 nt, synthetic construct
  source 1..20: mol_type = other RNA
tccctgctgactctgacttt

SEQ ID NO: 1167 - RNA, 20 nt, synthetic construct
  source 1..20: mol_type = other RNA
aggcatcctctccccaaagg

SEQ ID NO: 1168 - RNA, 20 nt, synthetic construct
  source 1..20: mol_type = other RNA
ccagcaggcccatggccttt

SEQ ID NO: 1169 - RNA, 20 nt, synthetic construct
  source 1..20: mol_type = other RNA
tctcggcagcaagcccattc

SEQ ID NO: 1170 - RNA, 20 nt, synthetic construct
  source 1..20: mol_type = other RNA
tgccctccctctcactctcc

SEQ ID NO: 1171 - RNA, 20 nt, synthetic construct
  source 1..20: mol_type = other RNA
cacttactgagaatgtatta

SEQ ID NO: 1172 - RNA, 20 nt, synthetic construct
  source 1..20: mol_type = other RNA
cattgtacagatgaggaaac

SEQ ID NO: 1173 - RNA, 20 nt, synthetic construct
  source 1..20: mol_type = other RNA
tcatctgtacaatgggaata

SEQ ID NO: 1174 - RNA, 20 nt, synthetic construct
  source 1..20: mol_type = other RNA
gtgaatacaagatctccatg

SEQ ID NO: 1175 - RNA, 20 nt, synthetic construct
  source 1..20: mol_type = other RNA
ccgaaacactgtctcgtccc

SEQ ID NO: 1176 - RNA, 20 nt, synthetic construct
  source 1..20: mol_type = other RNA
tggagatcttgtattcaccg

SEQ ID NO: 1177 - RNA, 20 nt, synthetic construct
  source 1..20: mol_type = other RNA
ttgtatgatttgtttcatgg

SEQ ID NO: 1178 - RNA, 20 nt, synthetic construct
  source 1..20: mol_type = other RNA
tagctgtataaagagcctaa

SEQ ID NO: 1179 - RNA, 20 nt, synthetic construct
  source 1..20: mol_type = other RNA
ctgagcctcaatcttcctag

SEQ ID NO: 1180 - RNA, 20 nt, synthetic construct
  source 1..20: mol_type = other RNA
ctctcccactccagccccag

SEQ ID NO: 1181 - RNA, 20 nt, synthetic construct
  source 1..20: mol_type = other RNA
tcccacagccttacataggg

SEQ ID NO: 1182 - RNA, 20 nt, synthetic construct
  source 1..20: mol_type = other RNA
gccacatccagatgaaagtc

SEQ ID NO: 1183 - RNA, 20 nt, synthetic construct
  source 1..20: mol_type = other RNA
tctggatgtggctgaagtca

SEQ ID NO: 1184 - RNA, 20 nt, synthetic construct
  source 1..20: mol_type = other RNA
gctgccccatctcaggggcc

SEQ ID NO: 1185 - RNA, 20 nt, synthetic construct
  source 1..20: mol_type = other RNA
cagcttcggctgccccatct

SEQ ID NO: 1186 - RNA, 20 nt, synthetic construct
  source 1..20: mol_type = other RNA
cctccatcactggttcccag

SEQ ID NO: 1187 - RNA, 20 nt, synthetic construct
  source 1..20: mol_type = other RNA
ggcctggatggaggctgccg

SEQ ID NO: 1188 - RNA, 20 nt, synthetic construct
  source 1..20: mol_type = other RNA
ctctcgtctgagcccttgtg

SEQ ID NO: 1189 - RNA, 20 nt, synthetic construct
  source 1..20: mol_type = other RNA
ccttcactctcgtctgagcc

SEQ ID NO: 1190 - RNA, 20 nt, synthetic construct
  source 1..20: mol_type = other RNA
gcccagttcaagggttaaaa

SEQ ID NO: 1191 - RNA, 20 nt, synthetic construct
  source 1..20: mol_type = other RNA
aaccccagctcctgtgctgt

SEQ ID NO: 1192 - RNA, 20 nt, synthetic construct
  source 1..20: mol_type = other RNA
ttactttccctagcctcagt

SEQ ID NO: 1193 - RNA, 20 nt, synthetic construct
  source 1..20: mol_type = other RNA
ctagcctcagtttccccaca

SEQ ID NO: 1194 - RNA, 20 nt, synthetic construct
  source 1..20: mol_type = other RNA
ccacacagggatgatcattc

SEQ ID NO: 1195 - RNA, 20 nt, synthetic construct
  source 1..20: mol_type = other RNA
tactacccaggaatgttgag

SEQ ID NO: 1196 - RNA, 20 nt, synthetic construct
  source 1..20: mol_type = other RNA
tgggtagtaggaatgatcat

SEQ ID NO: 1197 - RNA, 20 nt, synthetic construct
  source 1..20: mol_type = other RNA
gagacatcaagggcctactg

SEQ ID NO: 1198 - RNA, 20 nt, synthetic construct
  source 1..20: mol_type = other RNA
aatttgggtctgctgctgac

SEQ ID NO: 1199 - RNA, 20 nt, synthetic construct
  source 1..20: mol_type = other RNA
caaacagacagggatgggag

SEQ ID NO: 1200 - RNA, 20 nt, synthetic construct
  source 1..20: mol_type = other RNA
tccatgtacttattcattcc

SEQ ID NO: 1201 - RNA, 20 nt, synthetic construct
  source 1..20: mol_type = other RNA
ttccatccacattactgagc

SEQ ID NO: 1202 - RNA, 20 nt, synthetic construct
  source 1..20: mol_type = other RNA
atccacattactgagcacca

SEQ ID NO: 1203 - RNA, 20 nt, synthetic construct
  source 1..20: mol_type = other RNA
tgcccagccttcactggaat

SEQ ID NO: 1204 - RNA, 20 nt, synthetic construct
  source 1..20: mol_type = other RNA
ctggaatctacccctgagga

SEQ ID NO: 1205 - RNA, 20 nt, synthetic construct
  source 1..20: mol_type = other RNA
agtgaaggctgggcaggaag

SEQ ID NO: 1206 - RNA, 20 nt, synthetic construct
  source 1..20: mol_type = other RNA
cctctgttgctcataggccc

SEQ ID NO: 1207 - RNA, 20 nt, synthetic construct
  source 1..20: mol_type = other RNA
gggttctcctctgttgctca

SEQ ID NO: 1208 - RNA, 20 nt, synthetic construct
  source 1..20: mol_type = other RNA
ccaattattcagggttctcc

SEQ ID NO: 1209 - RNA, 20 nt, synthetic construct
  source 1..20: mol_type = other RNA
gataatagcatagtaatagc

SEQ ID NO: 1210 - RNA, 20 nt, synthetic construct
  source 1..20: mol_type = other RNA
tgagcaccttctatgtgcca

SEQ ID NO: 1211 - RNA, 20 nt, synthetic construct
  source 1..20: mol_type = other RNA
atgtgccaggcactgtgcaa

SEQ ID NO: 1212 - RNA, 20 nt, synthetic construct
  source 1..20: mol_type = other RNA
taggtttacagcagataata

SEQ ID NO: 1213 - RNA, 20 nt, synthetic construct
  source 1..20: mol_type = other RNA
ttcttaggtttacagcagat

SEQ ID NO: 1214 - RNA, 20 nt, synthetic construct
  source 1..20: mol_type = other RNA
ctcctgcagttctttcttag

SEQ ID NO: 1215 - RNA, 20 nt, synthetic construct
  source 1..20: mol_type = other RNA
gttattgggaagaaactgag

SEQ ID NO: 1216 - RNA, 20 nt, synthetic construct
  source 1..20: mol_type = other RNA
caataacagaattcactcct

SEQ ID NO: 1217 - RNA, 20 nt, synthetic construct
  source 1..20: mol_type = other RNA
tcccaataacagaattcact

SEQ ID NO: 1218 - RNA, 20 nt, synthetic construct
  source 1..20: mol_type = other RNA
cgggcctcagtttcttccca

SEQ ID NO: 1219 - RNA, 20 nt, synthetic construct
  source 1..20: mol_type = other RNA
agccgctagctgcaagacct

SEQ ID NO: 1220 - RNA, 20 nt, synthetic construct
  source 1..20: mol_type = other RNA
gactcagagatacccttgcc

SEQ ID NO: 1221 - RNA, 20 nt, synthetic construct
  source 1..20: mol_type = other RNA
ttccaagatgacctggacat

SEQ ID NO: 1222 - RNA, 20 nt, synthetic construct
  source 1..20: mol_type = other RNA
aagatgacctggacatggac

SEQ ID NO: 1223 - RNA, 20 nt, synthetic construct
  source 1..20: mol_type = other RNA
ctggagtccatgtccaggtc

SEQ ID NO: 1224 - RNA, 20 nt, synthetic construct
  source 1..20: mol_type = other RNA
tccctgtcatgtggagatgc

SEQ ID NO: 1225 - RNA, 20 nt, synthetic construct
  source 1..20: mol_type = other RNA
tgttgtggggaacaagcttc

SEQ ID NO: 1226 - RNA, 20 nt, synthetic construct
  source 1..20: mol_type = other RNA
aagactttgccctgattgat

SEQ ID NO: 1227 - RNA, 20 nt, synthetic construct
  source 1..20: mol_type = other RNA
cactgctgcccctcttgggg

SEQ ID NO: 1228 - RNA, 20 nt, synthetic construct
  source 1..20: mol_type = other RNA
cctccacctttgtccttggg

SEQ ID NO: 1229 - RNA, 20 nt, synthetic construct
  source 1..20: mol_type = other RNA
gacacaggtggggaggaacc

SEQ ID NO: 1230 - RNA, 20 nt, synthetic construct
  source 1..20: mol_type = other RNA
tccccacctgtgtccgaagc

SEQ ID NO: 1231 - RNA, 20 nt, synthetic construct
  source 1..20: mol_type = other RNA
caggttcctccccacctgtg

SEQ ID NO: 1232 - RNA, 20 nt, synthetic construct
  source 1..20: mol_type = other RNA
ttctcaggttcctccccacc

SEQ ID NO: 1233 - RNA, 20 nt, synthetic construct
  source 1..20: mol_type = other RNA
tcttccttctcaggttcctc

SEQ ID NO: 1234 - RNA, 20 nt, synthetic construct
  source 1..20: mol_type = other RNA
agtctggaactgctgctgac

SEQ ID NO: 1235 - RNA, 20 nt, synthetic construct
  source 1..20: mol_type = other RNA
agactagaagctacggagca

SEQ ID NO: 1236 - RNA, 20 nt, synthetic construct
  source 1..20: mol_type = other RNA
aatagttagtggtctttggc

SEQ ID NO: 1237 - RNA, 20 nt, synthetic construct
  source 1..20: mol_type = other RNA
aaggttggccaaagaccact

SEQ ID NO: 1238 - RNA, 20 nt, synthetic construct
  source 1..20: mol_type = other RNA
gctgctgcaaacctcaacaa

SEQ ID NO: 1239 - RNA, 20 nt, synthetic construct
  source 1..20: mol_type = other RNA
cccaaagctgacctctgaga

SEQ ID NO: 1240 - RNA, 20 nt, synthetic construct
  source 1..20: mol_type = other RNA
tctcagaggtcagctttggg

SEQ ID NO: 1241 - RNA, 20 nt, synthetic construct
  source 1..20: mol_type = other RNA
ttggtgctccctctgggccc

SEQ ID NO: 1242 - RNA, 20 nt, synthetic construct
  source 1..20: mol_type = other RNA
caaaggatcaggggcccaga

SEQ ID NO: 1243 - RNA, 20 nt, synthetic construct
  source 1..20: mol_type = other RNA
ctgcagctgccaggatcctg

SEQ ID NO: 1244 - RNA, 20 nt, synthetic construct
  source 1..20: mol_type = other RNA
cctgggctatggggttctgg

SEQ ID NO: 1245 - RNA, 20 nt, synthetic construct
  source 1..20: mol_type = other RNA
gggttgaggctggggttccc

SEQ ID NO: 1246 - RNA, 20 nt, synthetic construct
  source 1..20: mol_type = other RNA
cggcctagggaagggcttcc

SEQ ID NO: 1247 - RNA, 20 nt, synthetic construct
  source 1..20: mol_type = other RNA
ctaggccgggaaccccagcc

SEQ ID NO: 1248 - RNA, 20 nt, synthetic construct
  source 1..20: mol_type = other RNA
gggttgaggccgggggtcct

SEQ ID NO: 1249 - RNA, 20 nt, synthetic construct
  source 1..20: mol_type = other RNA
ctaggccaggacccccggcc

SEQ ID NO: 1250 - RNA, 20 nt, synthetic construct
  source 1..20: mol_type = other RNA
cagggccatgaccttgtaac

SEQ ID NO: 1251 - RNA, 20 nt, synthetic construct
  source 1..20: mol_type = other RNA
ttttctttctgggtcatttc

SEQ ID NO: 1252 - RNA, 20 nt, synthetic construct
  source 1..20: mol_type = other RNA
ttctgggtcatttctgcctc

SEQ ID NO: 1253 - RNA, 20 nt, synthetic construct
  source 1..20: mol_type = other RNA
gggtcatttctgcctctgca

SEQ ID NO: 1254 - RNA, 20 nt, synthetic construct
  source 1..20: mol_type = other RNA
gcctctgcagtgaaggatgc

SEQ ID NO: 1255 - RNA, 20 nt, synthetic construct
  source 1..20: mol_type = other RNA
ctgcagaggcagaaatgacc

SEQ ID NO: 1256 - RNA, 20 nt, synthetic construct
  source 1..20: mol_type = other RNA
tggtcacagctgagtcttcg

SEQ ID NO: 1257 - RNA, 20 nt, synthetic construct
  source 1..20: mol_type = other RNA
gatgaggtgaggggtagcat

SEQ ID NO: 1258 - RNA, 20 nt, synthetic construct
  source 1..20: mol_type = other RNA
aacgtgggttgtaggctgcc

SEQ ID NO: 1259 - RNA, 20 nt, synthetic construct
  source 1..20: mol_type = other RNA
acatttaaaggggtcatctt

SEQ ID NO: 1260 - RNA, 20 nt, synthetic construct
  source 1..20: mol_type = other RNA
ttcacctgcaaattcttttc

SEQ ID NO: 1261 - RNA, 20 nt, synthetic construct
  source 1..20: mol_type = other RNA
cctgcaaattcttttcttta

SEQ ID NO: 1262 - RNA, 20 nt, synthetic construct
  source 1..20: mol_type = other RNA
tttctttaaaaccacccctt

SEQ ID NO: 1263 - RNA, 20 nt, synthetic construct
  source 1..20: mol_type = other RNA
ttaaaaccaccccttccctc

SEQ ID NO: 1264 - RNA, 20 nt, synthetic construct
  source 1..20: mol_type = other RNA
ctcggggcaggatacgtgag

SEQ ID NO: 1265 - RNA, 20 nt, synthetic construct
  source 1..20: mol_type = other RNA
ggaagtaagccctcactgca

SEQ ID NO: 1266 - RNA, 20 nt, synthetic construct
  source 1..20: mol_type = other RNA
ggaagagggcctctggtgcc

SEQ ID NO: 1267 - RNA, 20 nt, synthetic construct
  source 1..20: mol_type = other RNA
gcaccacacagcacacccca

SEQ ID NO: 1268 - RNA, 20 nt, synthetic construct
  source 1..20: mol_type = other RNA
ccacacccctgaaccacaac

SEQ ID NO: 1269 - RNA, 20 nt, synthetic construct
  source 1..20: mol_type = other RNA
ggggtgtggggaatcactcc

SEQ ID NO: 1270 - RNA, 20 nt, synthetic construct
  source 1..20: mol_type = other RNA
tgctggcaggcccagcaacc

SEQ ID NO: 1271 - RNA, 20 nt, synthetic construct
  source 1..20: mol_type = other RNA
agagttagcatctgcagggg

SEQ ID NO: 1272 - RNA, 20 nt, synthetic construct
  source 1..20: mol_type = other RNA
tgggcagatcaggtgtgtgg

SEQ ID NO: 1273 - RNA, 20 nt, synthetic construct
  source 1..20: mol_type = other RNA
cgctcgaagatacctcattt

SEQ ID NO: 1274 - RNA, 20 nt, synthetic construct
  source 1..20: mol_type = other RNA
agcgtgaaaggggcctccta

SEQ ID NO: 1275 - RNA, 20 nt, synthetic construct
  source 1..20: mol_type = other RNA
catgtgcaaatgacagatga

SEQ ID NO: 1276 - RNA, 20 nt, synthetic construct
  source 1..20: mol_type = other RNA
tctgtcatttgcacatgaga

SEQ ID NO: 1277 - RNA, 20 nt, synthetic construct
  source 1..20: mol_type = other RNA
aagatatgcgcacttcatct

SEQ ID NO: 1278 - RNA, 20 nt, synthetic construct
  source 1..20: mol_type = other RNA
aagattccaagatatgcgca

SEQ ID NO: 1279 - RNA, 20 nt, synthetic construct
  source 1..20: mol_type = other RNA
tcttgcagtaagggggaatg

SEQ ID NO: 1280 - RNA, 20 nt, synthetic construct
  source 1..20: mol_type = other RNA
tgcagtaagggggaatgaac

SEQ ID NO: 1281 - RNA, 20 nt, synthetic construct
  source 1..20: mol_type = other RNA
cccttactgcaagaagaaac

SEQ ID NO: 1282 - RNA, 20 nt, synthetic construct
  source 1..20: mol_type = other RNA
ttcccccttactgcaagaag

SEQ ID NO: 1283 - RNA, 20 nt, synthetic construct
  source 1..20: mol_type = other RNA
ctgtggtgttcattccccct

SEQ ID NO: 1284 - RNA, 20 nt, synthetic construct
  source 1..20: mol_type = other RNA
gagactccccctggttcgct

SEQ ID NO: 1285 - RNA, 20 nt, synthetic construct
  source 1..20: mol_type = other RNA
aatacctctttcagagactc

SEQ ID NO: 1286 - RNA, 20 nt, synthetic construct
  source 1..20: mol_type = other RNA
agagtccctccaacctgaca

SEQ ID NO: 1287 - RNA, 20 nt, synthetic construct
  source 1..20: mol_type = other RNA
accctctggagagggaaagg

SEQ ID NO: 1288 - RNA, 20 nt, synthetic construct
  source 1..20: mol_type = other RNA
ctctccagagggtggaaact

SEQ ID NO: 1289 - RNA, 20 nt, synthetic construct
  source 1..20: mol_type = other RNA
ctgcccctgggccccctgcc

SEQ ID NO: 1290 - RNA, 20 nt, synthetic construct
  source 1..20: mol_type = other RNA
ctgtaaaattgggtgagggt

SEQ ID NO: 1291 - RNA, 20 nt, synthetic construct
  source 1..20: mol_type = other RNA
ggagcctgggatttataaca

SEQ ID NO: 1292 - RNA, 20 nt, synthetic construct
  source 1..20: mol_type = other RNA
gattctggagcctgggattt

SEQ ID NO: 1293 - RNA, 20 nt, synthetic construct
  source 1..20: mol_type = other RNA
gcctcagccagttccttgct

SEQ ID NO: 1294 - RNA, 20 nt, synthetic construct
  source 1..20: mol_type = other RNA
actgagcatctccctgtgct

SEQ ID NO: 1295 - RNA, 20 nt, synthetic construct
  source 1..20: mol_type = other RNA
atgactgcctattgcccaca

SEQ ID NO: 1296 - RNA, 20 nt, synthetic construct
  source 1..20: mol_type = other RNA
cccagtacctagcacagggg

SEQ ID NO: 1297 - RNA, 20 nt, synthetic construct
  source 1..20: mol_type = other RNA
cccaagacaagcatgggtca

SEQ ID NO: 1298 - RNA, 20 nt, synthetic construct
  source 1..20: mol_type = other RNA
tttgtgggatcacagatatt

SEQ ID NO: 1299 - RNA, 20 nt, synthetic construct
  source 1..20: mol_type = other RNA
tttgtttcttttgtgggatc

SEQ ID NO: 1300 - RNA, 20 nt, synthetic construct
  source 1..20: mol_type = other RNA
cctgaggttaaccatgtttt

SEQ ID NO: 1301 - RNA, 20 nt, synthetic construct
  source 1..20: mol_type = other RNA
tgttttaatttgcattcccc

SEQ ID NO: 1302 - RNA, 20 nt, synthetic construct
  source 1..20: mol_type = other RNA
cccataacactggcatcatt

SEQ ID NO: 1303 - RNA, 20 nt, synthetic construct
  source 1..20: mol_type = other RNA
gccagctccacctattatta

SEQ ID NO: 1304 - RNA, 20 nt, synthetic construct
  source 1..20: mol_type = other RNA
tccacattctgccagctcca

SEQ ID NO: 1305 - RNA, 20 nt, synthetic construct
  source 1..20: mol_type = other RNA
gacgttgctgatgtgaatgg

SEQ ID NO: 1306 - RNA, 20 nt, synthetic construct
  source 1..20: mol_type = other RNA
cttaattatacattacaaaa

SEQ ID NO: 1307 - RNA, 20 nt, synthetic construct
  source 1..20: mol_type = other RNA
ctccttccttgattttgttt

SEQ ID NO: 1308 - RNA, 20 nt, synthetic construct
  source 1..20: mol_type = other RNA
ttgattttgtttgtgagtga

SEQ ID NO: 1309 - RNA, 20 nt, synthetic construct
  source 1..20: mol_type = other RNA
gtcaatgaattgtgattggt

SEQ ID NO: 1310 - RNA, 20 nt, synthetic construct
  source 1..20: mol_type = other RNA
ttgactgaaagtggggatgt

SEQ ID NO: 1311 - RNA, 20 nt, synthetic construct
  source 1..20: mol_type = other RNA
ctgctgctggaggtggtcct

SEQ ID NO: 1312 - RNA, 20 nt, synthetic construct
  source 1..20: mol_type = other RNA
ggccagtaagacctaaagag

SEQ ID NO: 1313 - RNA, 20 nt, synthetic construct
  source 1..20: mol_type = other RNA
ctttaggtcttactggccag

SEQ ID NO: 1314 - RNA, 20 nt, synthetic construct
  source 1..20: mol_type = other RNA
gaagtttttgcttttataat

SEQ ID NO: 1315 - RNA, 20 nt, synthetic construct
  source 1..20: mol_type = other RNA
gaaagtgacccccaacagat

SEQ ID NO: 1316 - RNA, 20 nt, synthetic construct
  source 1..20: mol_type = other RNA
gcatttttattataaaagca

SEQ ID NO: 1317 - RNA, 20 nt, synthetic construct
  source 1..20: mol_type = other RNA
atgcctgcaaaggcagtcac

SEQ ID NO: 1318 - RNA, 20 nt, synthetic construct
  source 1..20: mol_type = other RNA
ctcatgactgcaagacagct

SEQ ID NO: 1319 - RNA, 20 nt, synthetic construct
  source 1..20: mol_type = other RNA
aagagattcacagagatgct

SEQ ID NO: 1320 - RNA, 20 nt, synthetic construct
  source 1..20: mol_type = other RNA
cagagatgctggacctaaca

SEQ ID NO: 1321 - RNA, 20 nt, synthetic construct
  source 1..20: mol_type = other RNA
acaatgttaggtccagcatc

SEQ ID NO: 1322 - RNA, 20 nt, synthetic construct
  source 1..20: mol_type = other RNA
ctggttcaacaatgttaggt

SEQ ID NO: 1323 - RNA, 20 nt, synthetic construct
  source 1..20: mol_type = other RNA
gaaagctgagtgggaccatc

SEQ ID NO: 1324 - RNA, 20 nt, synthetic construct
  source 1..20: mol_type = other RNA
gaaaatatgtatttatagcc

SEQ ID NO: 1325 - RNA, 20 nt, synthetic construct
  source 1..20: mol_type = other RNA
cacaacaaatccaggtcatc

SEQ ID NO: 1326 - RNA, 20 nt, synthetic construct
  source 1..20: mol_type = other RNA
tgcagatgacctggatttgt

SEQ ID NO: 1327 - RNA, 20 nt, synthetic construct
  source 1..20: mol_type = other RNA
tcaaggtcattttcatgcag

SEQ ID NO: 1328 - RNA, 20 nt, synthetic construct
  source 1..20: mol_type = other RNA
tctcctccaattttcctcaa

SEQ ID NO: 1329 - RNA, 20 nt, synthetic construct
  source 1..20: mol_type = other RNA
tccctggctgagatggctga

SEQ ID NO: 1330 - RNA, 20 nt, synthetic construct
  source 1..20: mol_type = other RNA
ctgcaccattaacaccctga

SEQ ID NO: 1331 - RNA, 20 nt, synthetic construct
  source 1..20: mol_type = other RNA
atcacctcctcgtcagggtg

SEQ ID NO: 1332 - RNA, 20 nt, synthetic construct
  source 1..20: mol_type = other RNA
ggggcccctagccctcaccc

SEQ ID NO: 1333 - RNA, 20 nt, synthetic construct
  source 1..20: mol_type = other RNA
gctgcttcgggggcccctag

SEQ ID NO: 1334 - RNA, 20 nt, synthetic construct
  source 1..20: mol_type = other RNA
tcccggtccccacctccact

SEQ ID NO: 1335 - RNA, 20 nt, synthetic construct
  source 1..20: mol_type = other RNA
ttcctttcaccctggacctc

SEQ ID NO: 1336 - RNA, 20 nt, synthetic construct
  source 1..20: mol_type = other RNA
tttcaccctggacctcagag

SEQ ID NO: 1337 - RNA, 20 nt, synthetic construct
  source 1..20: mol_type = other RNA
ccctggacctcagagcactg

SEQ ID NO: 1338 - RNA, 20 nt, synthetic construct
  source 1..20: mol_type = other RNA
tccccctccatgcttgcctc

SEQ ID NO: 1339 - RNA, 20 nt, synthetic construct
  source 1..20: mol_type = other RNA
aaagcagttttagatgtgct

SEQ ID NO: 1340 - RNA, 20 nt, synthetic construct
  source 1..20: mol_type = other RNA
gctgatgagtgaactgaggc

SEQ ID NO: 1341 - RNA, 20 nt, synthetic construct
  source 1..20: mol_type = other RNA
ctcatcagcagaacagtggc

SEQ ID NO: 1342 - RNA, 20 nt, synthetic construct
  source 1..20: mol_type = other RNA
gagcctcagttcactcatca

SEQ ID NO: 1343 - RNA, 20 nt, synthetic construct
  source 1..20: mol_type = other RNA
cggtgtgaccctgggcaaca

SEQ ID NO: 1344 - RNA, 20 nt, synthetic construct
  source 1..20: mol_type = other RNA
aatcccagctctgctacaaa

SEQ ID NO: 1345 - RNA, 20 nt, synthetic construct
  source 1..20: mol_type = other RNA
ggatctccgcctgggtcgtg

SEQ ID NO: 1346 - RNA, 20 nt, synthetic construct
  source 1..20: mol_type = other RNA
gcctccacaacatccccttc

SEQ ID NO: 1347 - RNA, 20 nt, synthetic construct
  source 1..20: mol_type = other RNA
ccctttcttccctcctcatg

SEQ ID NO: 1348 - RNA, 20 nt, synthetic construct
  source 1..20: mol_type = other RNA
tccctcctcatgatagccac

SEQ ID NO: 1349 - RNA, 20 nt, synthetic construct
  source 1..20: mol_type = other RNA
ctcctcatgatagccactgt

SEQ ID NO: 1350 - RNA, 20 nt, synthetic construct
  source 1..20: mol_type = other RNA
ctttggtctggagagagtgg

SEQ ID NO: 1351 - RNA, 20 nt, synthetic construct
  source 1..20: mol_type = other RNA
gctggaccaggagctcctac

SEQ ID NO: 1352 - RNA, 20 nt, synthetic construct
  source 1..20: mol_type = other RNA
ctttgccaagggagtcctct

SEQ ID NO: 1353 - RNA, 20 nt, synthetic construct
  source 1..20: mol_type = other RNA
ccctcttctctttgccaagg

SEQ ID NO: 1354 - RNA, 20 nt, synthetic construct
  source 1..20: mol_type = other RNA
gccctatgttccccctcttc

SEQ ID NO: 1355 - RNA, 20 nt, synthetic construct
  source 1..20: mol_type = other RNA
gggagtgctgcctggaggag

SEQ ID NO: 1356 - RNA, 20 nt, synthetic construct
  source 1..20: mol_type = other RNA
catgacacccaccccaaggg

SEQ ID NO: 1357 - RNA, 20 nt, synthetic construct
  source 1..20: mol_type = other RNA
ttgcctgataattctcatga

SEQ ID NO: 1358 - RNA, 20 nt, synthetic construct
  source 1..20: mol_type = other RNA
cagcattctttgcctgataa

SEQ ID NO: 1359 - RNA, 20 nt, synthetic construct
  source 1..20: mol_type = other RNA
aggaggaaggcatagcatga

SEQ ID NO: 1360 - RNA, 20 nt, synthetic construct
  source 1..20: mol_type = other RNA
tcctggaatgcccttcccag

SEQ ID NO: 1361 - RNA, 20 nt, synthetic construct
  source 1..20: mol_type = other RNA
gggagtaaatctgtggttcc

SEQ ID NO: 1362 - RNA, 20 nt, synthetic construct
  source 1..20: mol_type = other RNA
cacacttagggctgctttgg

SEQ ID NO: 1363 - RNA, 20 nt, synthetic construct
  source 1..20: mol_type = other RNA
taaactcctcaggagatacc

SEQ ID NO: 1364 - RNA, 20 nt, synthetic construct
  source 1..20: mol_type = other RNA
tgggcccagttcctggagat

SEQ ID NO: 1365 - RNA, 20 nt, synthetic construct
  source 1..20: mol_type = other RNA
tggagattctgggccaggca

SEQ ID NO: 1366 - RNA, 20 nt, synthetic construct
  source 1..20: mol_type = other RNA
gggccaggcagaggaatctg

SEQ ID NO: 1367 - RNA, 20 nt, synthetic construct
  source 1..20: mol_type = other RNA
tctgcctggcccagaatctc

SEQ ID NO: 1368 - RNA, 20 nt, synthetic construct
  source 1..20: mol_type = other RNA
caaagcgggagggtaggagg

SEQ ID NO: 1369 - RNA, 20 nt, synthetic construct
  source 1..20: mol_type = other RNA
accactctgatgcaggtggc

SEQ ID NO: 1370 - RNA, 20 nt, synthetic construct
  source 1..20: mol_type = other RNA
ccaagcatggcccaggggcc

SEQ ID NO: 1371 - RNA, 20 nt, synthetic construct
  source 1..20: mol_type = other RNA
tacagcgcactccacctctg

SEQ ID NO: 1372 - RNA, 20 nt, synthetic construct
  source 1..20: mol_type = other RNA
gcagctcttcctacagcgca

SEQ ID NO: 1373 - RNA, 20 nt, synthetic construct
  source 1..20: mol_type = other RNA
ataggcttgtccaagagggt

SEQ ID NO: 1374 - RNA, 20 nt, synthetic construct
  source 1..20: mol_type = other RNA
cttttcatcattctctagtg

SEQ ID NO: 1375 - RNA, 20 nt, synthetic construct
  source 1..20: mol_type = other RNA
tcattctctagtgctcttat

SEQ ID NO: 1376 - RNA, 20 nt, synthetic construct
  source 1..20: mol_type = other RNA
ctagtgctcttatcaccaac

SEQ ID NO: 1377 - RNA, 20 nt, synthetic construct
  source 1..20: mol_type = other RNA
gcctataagttggtgataag

SEQ ID NO: 1378 - RNA, 20 nt, synthetic construct
  source 1..20: mol_type = other RNA
ctcaactatgagggctgcat

SEQ ID NO: 1379 - RNA, 20 nt, synthetic construct
  source 1..20: mol_type = other RNA
catgcagccctcatagttga

SEQ ID NO: 1380 - RNA, 20 nt, synthetic construct
  source 1..20: mol_type = other RNA
ctgctgtaccccaatgtctg

SEQ ID NO: 1381 - RNA, 20 nt, synthetic construct
  source 1..20: mol_type = other RNA
atgttacagacattggggta

SEQ ID NO: 1382 - RNA, 20 nt, synthetic construct
  source 1..20: mol_type = other RNA
gtttgcattttttttctttt

SEQ ID NO: 1383 - RNA, 20 nt, synthetic construct
  source 1..20: mol_type = other RNA
ttttgagatggagtctccct

SEQ ID NO: 1384 - RNA, 20 nt, synthetic construct
  source 1..20: mol_type = other RNA
tcctgggtgacaagagggag

SEQ ID NO: 1385 - RNA, 20 nt, synthetic construct
  source 1..20: mol_type = other RNA
agcgattctctgcctcagcc

SEQ ID NO: 1386 - RNA, 20 nt, synthetic construct
  source 1..20: mol_type = other RNA
ctgcctcagcctaccgagta

SEQ ID NO: 1387 - RNA, 20 nt, synthetic construct
  source 1..20: mol_type = other RNA
ccatgttggtcaggctggtc

SEQ ID NO: 1388 - RNA, 20 nt, synthetic construct
  source 1..20: mol_type = other RNA
agaccagcctgaccaacatg

SEQ ID NO: 1389 - RNA, 20 nt, synthetic construct
  source 1..20: mol_type = other RNA
ggtgatccacccgcctcagc

SEQ ID NO: 1390 - RNA, 20 nt, synthetic construct
  source 1..20: mol_type = other RNA
accctaaaaaaacaaaatgc

SEQ ID NO: 1391 - RNA, 20 nt, synthetic construct
  source 1..20: mol_type = other RNA
tgccagcctctcagcacgct

SEQ ID NO: 1392 - RNA, 20 nt, synthetic construct
  source 1..20: mol_type = other RNA
ctgacatgtctgcctggctc

SEQ ID NO: 1393 - RNA, 20 nt, synthetic construct
  source 1..20: mol_type = other RNA
ctttaagccggcagggagtg

SEQ ID NO: 1394 - RNA, 20 nt, synthetic construct
  source 1..20: mol_type = other RNA
tggcacctgccacaggcagc

SEQ ID NO: 1395 - RNA, 20 nt, synthetic construct
  source 1..20: mol_type = other RNA
ccatgaagtggcagacaagg

SEQ ID NO: 1396 - RNA, 20 nt, synthetic construct
  source 1..20: mol_type = other RNA
tggagaaaaggaggccactg

SEQ ID NO: 1397 - RNA, 20 nt, synthetic construct
  source 1..20: mol_type = other RNA
tgggaagagaggggaggaga

SEQ ID NO: 1398 - RNA, 20 nt, synthetic construct
  source 1..20: mol_type = other RNA
caggaagccccttgtctgcc

SEQ ID NO: 1399 - RNA, 20 nt, synthetic construct
  source 1..20: mol_type = other RNA
tgagcaggtggagaggaaag

SEQ ID NO: 1400 - RNA, 20 nt, synthetic construct
  source 1..20: mol_type = other RNA
tctccacctgctcaagaatg

SEQ ID NO: 1401 - RNA, 20 nt, synthetic construct
  source 1..20: mol_type = other RNA
gaatctcccagagtccccta

SEQ ID NO: 1402 - RNA, 20 nt, synthetic construct
  source 1..20: mol_type = other RNA
gaacaaaagagggtcatgac

SEQ ID NO: 1403 - RNA, 20 nt, synthetic construct
  source 1..20: mol_type = other RNA
taccaccattataactggac

SEQ ID NO: 1404 - RNA, 20 nt, synthetic construct
  source 1..20: mol_type = other RNA
tggaggtggcagctcgggat

SEQ ID NO: 1405 - RNA, 20 nt, synthetic construct
  source 1..20: mol_type = other RNA
gtgcccatctgactgagttc

SEQ ID NO: 1406 - RNA, 20 nt, synthetic construct
  source 1..20: mol_type = other RNA
cgcagcacctagcctgtccc

SEQ ID NO: 1407 - RNA, 20 nt, synthetic construct
  source 1..20: mol_type = other RNA
gtgagacttggctcctcttg

SEQ ID NO: 1408 - RNA, 20 nt, synthetic construct
  source 1..20: mol_type = other RNA
gctcaggggtgagagcaggt

SEQ ID NO: 1409 - RNA, 20 nt, synthetic construct
  source 1..20: mol_type = other RNA
ggccactctggagcagcagc

SEQ ID NO: 1410 - RNA, 20 nt, synthetic construct
  source 1..20: mol_type = other RNA
tgggagaggcctggttctct

SEQ ID NO: 1411 - RNA, 20 nt, synthetic construct
  source 1..20: mol_type = other RNA
ctgggcctgtccctctctcc

SEQ ID NO: 1412 - RNA, 20 nt, synthetic construct
  source 1..20: mol_type = other RNA
ttccttcctcccttcctgaa

SEQ ID NO: 1413 - RNA, 20 nt, synthetic construct
  source 1..20: mol_type = other RNA
ttcctcccttcctgaaactg

SEQ ID NO: 1414 - RNA, 20 nt, synthetic construct
  source 1..20: mol_type = other RNA
tcccttcctgaaactgcgtc

SEQ ID NO: 1415 - RNA, 20 nt, synthetic construct
  source 1..20: mol_type = other RNA
tgaaactgcgtcctccaaat

SEQ ID NO: 1416 - RNA, 20 nt, synthetic construct
  source 1..20: mol_type = other RNA
ggaagggaggaaggaaggaa

SEQ ID NO: 1417 - RNA, 20 nt, synthetic construct
  source 1..20: mol_type = other RNA
acagcctctggcagcgtttc

SEQ ID NO: 1418 - RNA, 20 nt, synthetic construct
  source 1..20: mol_type = other RNA
gtccctttctggccttgact

SEQ ID NO: 1419 - RNA, 20 nt, synthetic construct
  source 1..20: mol_type = other RNA
ggccttgactggaaggcccc

SEQ ID NO: 1420 - RNA, 20 nt, synthetic construct
  source 1..20: mol_type = other RNA
agtcaaggccagaaagggac

SEQ ID NO: 1421 - RNA, 20 nt, synthetic construct
  source 1..20: mol_type = other RNA
ccccgcctgagaggggtagg

SEQ ID NO: 1422 - RNA, 20 nt, synthetic construct
  source 1..20: mol_type = other RNA
ctcctccataaacgcagtca

SEQ ID NO: 1423 - RNA, 20 nt, synthetic construct
  source 1..20: mol_type = other RNA
ggcaacgacagaccacatac

SEQ ID NO: 1424 - RNA, 20 nt, synthetic construct
  source 1..20: mol_type = other RNA
ataagattacaacagagctg

SEQ ID NO: 1425 - RNA, 20 nt, synthetic construct
  source 1..20: mol_type = other RNA
cagctctgttgtaatcttat

SEQ ID NO: 1426 - RNA, 20 nt, synthetic construct
  source 1..20: mol_type = other RNA
ggccatctgggcgtatacgt

SEQ ID NO: 1427 - RNA, 20 nt, synthetic construct
  source 1..20: mol_type = other RNA
gttacttcaggccatctggg

SEQ ID NO: 1428 - RNA, 20 nt, synthetic construct
  source 1..20: mol_type = other RNA
tcagttacttcaggccatct

SEQ ID NO: 1429 - RNA, 20 nt, synthetic construct
  source 1..20: mol_type = other RNA
tttgtgattcttcagttact

SEQ ID NO: 1430 - RNA, 20 nt, synthetic construct
  source 1..20: mol_type = other RNA
cttcttttgtgattcttcag

SEQ ID NO: 1431 - RNA, 20 nt, synthetic construct
  source 1..20: mol_type = other RNA
accacaaaagaagtgtaaat

SEQ ID NO: 1432 - RNA, 20 nt, synthetic construct
  source 1..20: mol_type = other RNA
tttgtggtggaatgtcatca

SEQ ID NO: 1433 - RNA, 20 nt, synthetic construct
  source 1..20: mol_type = other RNA
caaggtaatgtcatcagtta

SEQ ID NO: 1434 - RNA, 20 nt, synthetic construct
  source 1..20: mol_type = other RNA
tggttcatcctggctcaaaa

SEQ ID NO: 1435 - RNA, 20 nt, synthetic construct
  source 1..20: mol_type = other RNA
tcctggctcaaaaagcacct

SEQ ID NO: 1436 - RNA, 20 nt, synthetic construct
  source 1..20: mol_type = other RNA
ctggcgggtaggagtggggg

SEQ ID NO: 1437 - RNA, 20 nt, synthetic construct
  source 1..20: mol_type = other RNA
tttacctacccaaatcctat

SEQ ID NO: 1438 - RNA, 20 nt, synthetic construct
  source 1..20: mol_type = other RNA
ctgactctctttttggactc

SEQ ID NO: 1439 - RNA, 20 nt, synthetic construct
  source 1..20: mol_type = other RNA
cctgggtgcaggcgggctga

SEQ ID NO: 1440 - RNA, 20 nt, synthetic construct
  source 1..20: mol_type = other RNA
cacggatgcacatgtaattt

SEQ ID NO: 1441 - RNA, 20 nt, synthetic construct
  source 1..20: mol_type = other RNA
ccaaattacatgtgcatccg

SEQ ID NO: 1442 - RNA, 20 nt, synthetic construct
  source 1..20: mol_type = other RNA
catggagcaaagagcaggag

SEQ ID NO: 1443 - RNA, 20 nt, synthetic construct
  source 1..20: mol_type = other RNA
tgggctggtcggtctgagga

SEQ ID NO: 1444 - RNA, 20 nt, synthetic construct
  source 1..20: mol_type = other RNA
agtccggtaagctgcctctt

SEQ ID NO: 1445 - RNA, 20 nt, synthetic construct
  source 1..20: mol_type = other RNA
ccaacctccctcactatccc

SEQ ID NO: 1446 - RNA, 20 nt, synthetic construct
  source 1..20: mol_type = other RNA
cctttcaatcttggcgccac

SEQ ID NO: 1447 - RNA, 20 nt, synthetic construct
  source 1..20: mol_type = other RNA
atcttggcgccacacttcaa

SEQ ID NO: 1448 - RNA, 20 nt, synthetic construct
  source 1..20: mol_type = other RNA
atctctcccttctcttaatt

SEQ ID NO: 1449 - RNA, 20 nt, synthetic construct
  source 1..20: mol_type = other RNA
cttaatttcaatttctttca

SEQ ID NO: 1450 - RNA, 20 nt, synthetic construct
  source 1..20: mol_type = other RNA
atttctttcattttttggta

SEQ ID NO: 1451 - RNA, 20 nt, synthetic construct
  source 1..20: mol_type = other RNA
ttcattttttggtagagaca

SEQ ID NO: 1452 - RNA, 20 nt, synthetic construct
  source 1..20: mol_type = other RNA
ttttttggtagagacaaaag

SEQ ID NO: 1453 - RNA, 20 nt, synthetic construct
  source 1..20: mol_type = other RNA
tggataaaacatgtctcttt

SEQ ID NO: 1454 - RNA, 20 nt, synthetic construct
  source 1..20: mol_type = other RNA
cagtccgtgaccggcaccgg

SEQ ID NO: 1455 - RNA, 20 nt, synthetic construct
  source 1..20: mol_type = other RNA
cttggtgtttaatcattgca

SEQ ID NO: 1456 - RNA, 20 nt, synthetic construct
  source 1..20: mol_type = other RNA
agggtgtcagaccacgcagg

SEQ ID NO: 1457 - RNA, 20 nt, synthetic construct
  source 1..20: mol_type = other RNA
cccttagcggcaagtcccgc

SEQ ID NO: 1458 - RNA, 20 nt, synthetic construct
  source 1..20: mol_type = other RNA
tagggggcaaggacccccca

SEQ ID NO: 1459 - RNA, 20 nt, synthetic construct
  source 1..20: mol_type = other RNA
gcaccccaacctcttatctc

SEQ ID NO: 1460 - RNA, 20 nt, synthetic construct
  source 1..20: mol_type = other RNA
gcaccctgacctcttatctc

SEQ ID NO: 1461 - RNA, 20 nt, synthetic construct
  source 1..20: mol_type = other RNA
gtgtcccaaccccctctctg

SEQ ID NO: 1462 - RNA, 20 nt, synthetic construct
  source 1..20: mol_type = other RNA
ggagggcaagaaccccactc

SEQ ID NO: 1463 - RNA, 20 nt, synthetic construct
  source 1..20: mol_type = other RNA
tgccctccagaaaagcagag

SEQ ID NO: 1464 - RNA, 20 nt, synthetic construct
  source 1..20: mol_type = other RNA
cagggtttgcctccttcact

SEQ ID NO: 1465 - RNA, 20 nt, synthetic construct
  source 1..20: mol_type = other RNA
ctatgggcaaccttccaccc

SEQ ID NO: 1466 - RNA, 20 nt, synthetic construct
  source 1..20: mol_type = other RNA
accctccattcctccttctt

SEQ ID NO: 1467 - RNA, 20 nt, synthetic construct
  source 1..20: mol_type = other RNA
tccttcttctcctttagcct

SEQ ID NO: 1468 - RNA, 20 nt, synthetic construct
  source 1..20: mol_type = other RNA
tctcctttagcctgtgtcct

SEQ ID NO: 1469 - RNA, 20 nt, synthetic construct
  source 1..20: mol_type = other RNA
cctttagcctgtgtccttaa

SEQ ID NO: 1470 - RNA, 20 nt, synthetic construct
  source 1..20: mol_type = other RNA
taaggacacaggctaaagga

SEQ ID NO: 1471 - RNA, 20 nt, synthetic construct
  source 1..20: mol_type = other RNA
actcacacctgacctaaaac

SEQ ID NO: 1472 - RNA, 20 nt, synthetic construct
  source 1..20: mol_type = other RNA
tctgcaacaccacttggccc

SEQ ID NO: 1473 - RNA, 20 nt, synthetic construct
  source 1..20: mol_type = other RNA
gcaacaccacttggccccaa

SEQ ID NO: 1474 - RNA, 20 nt, synthetic construct
  source 1..20: mol_type = other RNA
ggccatttagggccattgtc

SEQ ID NO: 1475 - RNA, 20 nt, synthetic construct
  source 1..20: mol_type = other RNA
gcatcctacaagacctaaat

SEQ ID NO: 1476 - RNA, 20 nt, synthetic construct
  source 1..20: mol_type = other RNA
acaaaaattatttaggtctt

SEQ ID NO: 1477 - RNA, 20 nt, synthetic construct
  source 1..20: mol_type = other RNA
cacttcgttccctccctagc

SEQ ID NO: 1478 - RNA, 20 nt, synthetic construct
  source 1..20: mol_type = other RNA
ttccctccctagcctctgtt

SEQ ID NO: 1479 - RNA, 20 nt, synthetic construct
  source 1..20: mol_type = other RNA
ctccctagcctctgttccca

SEQ ID NO: 1480 - RNA, 20 nt, synthetic construct
  source 1..20: mol_type = other RNA
caatgcaattcctcccagat

SEQ ID NO: 1481 - RNA, 20 nt, synthetic construct
  source 1..20: mol_type = other RNA
tcccagatcctccttctttc

SEQ ID NO: 1482 - RNA, 20 nt, synthetic construct
  source 1..20: mol_type = other RNA
ttccctcccgcctgtcccct

SEQ ID NO: 1483 - RNA, 20 nt, synthetic construct
  source 1..20: mol_type = other RNA
ctcccgcctgtcccctcagt

SEQ ID NO: 1484 - RNA, 20 nt, synthetic construct
  source 1..20: mol_type = other RNA
agtcttccttttctacagac

SEQ ID NO: 1485 - RNA, 20 nt, synthetic construct
  source 1..20: mol_type = other RNA
ttttctacagacccatctga

SEQ ID NO: 1486 - RNA, 20 nt, synthetic construct
  source 1..20: mol_type = other RNA
acagacccatctgacctttc

SEQ ID NO: 1487 - RNA, 20 nt, synthetic construct
  source 1..20: mol_type = other RNA
cctcctccccaggctgctca

SEQ ID NO: 1488 - RNA, 20 nt, synthetic construct
  source 1..20: mol_type = other RNA
tcctcagcctccgctcctcc

SEQ ID NO: 1489 - RNA, 20 nt, synthetic construct
  source 1..20: mol_type = other RNA
tcagcctccgctcctccacc

SEQ ID NO: 1490 - RNA, 20 nt, synthetic construct
  source 1..20: mol_type = other RNA
ttccgtgactggccctcccc

SEQ ID NO: 1491 - RNA, 20 nt, synthetic construct
  source 1..20: mol_type = other RNA
gtgactggccctcccccacc

SEQ ID NO: 1492 - RNA, 20 nt, synthetic construct
  source 1..20: mol_type = other RNA
ttatcccaaatcagatagca

SEQ ID NO: 1493 - RNA, 20 nt, synthetic construct
  source 1..20: mol_type = other RNA
tcaaatataaaaatccagcc

SEQ ID NO: 1494 - RNA, 20 nt, synthetic construct
  source 1..20: mol_type = other RNA
tgactcgtttggcagcaacc

SEQ ID NO: 1495 - RNA, 20 nt, synthetic construct
  source 1..20: mol_type = other RNA
caatactcattttattaccc

SEQ ID NO: 1496 - RNA, 20 nt, synthetic construct
  source 1..20: mol_type = other RNA
agccctcaaacctcacaaca

SEQ ID NO: 1497 - RNA, 20 nt, synthetic construct
  source 1..20: mol_type = other RNA
aggtgtgcaataatagaaaa

SEQ ID NO: 1498 - RNA, 20 nt, synthetic construct
  source 1..20: mol_type = other RNA
attattgcacaccttgaagg

SEQ ID NO: 1499 - RNA, 20 nt, synthetic construct
  source 1..20: mol_type = other RNA
ttgcctccactgtgagacaa

SEQ ID NO: 1500 - RNA, 20 nt, synthetic construct
  source 1..20: mol_type = other RNA
tgtgtgctggagatgtggct

SEQ ID NO: 1501 - RNA, 20 nt, synthetic construct
  source 1..20: mol_type = other RNA
aaacgcctgaaccacagcgg

SEQ ID NO: 1502 - RNA, 20 nt, synthetic construct
  source 1..20: mol_type = other RNA
ggcgtttggaagttcttgtg

SEQ ID NO: 1503 - RNA, 20 nt, synthetic construct
  source 1..20: mol_type = other RNA
tccagaacctcctcccccag

SEQ ID NO: 1504 - RNA, 20 nt, synthetic construct
  source 1..20: mol_type = other RNA
ggaggaacgcctggccgctg

SEQ ID NO: 1505 - RNA, 20 nt, synthetic construct
  source 1..20: mol_type = other RNA
ggcacttgtagcaaactcct

SEQ ID NO: 1506 - RNA, 20 nt, synthetic construct
  source 1..20: mol_type = other RNA
ttggcccagtggccagattt

SEQ ID NO: 1507 - RNA, 20 nt, synthetic construct
  source 1..20: mol_type = other RNA
tcttaagccgcgtcccatct

SEQ ID NO: 1508 - RNA, 20 nt, synthetic construct
  source 1..20: mol_type = other RNA
gtggggtcccacacagatgg

SEQ ID NO: 1509 - RNA, 20 nt, synthetic construct
  source 1..20: mol_type = other RNA
actcacctggcagccactcc

SEQ ID NO: 1510 - RNA, 20 nt, synthetic construct
  source 1..20: mol_type = other RNA
aggggctctgggagtggctg

SEQ ID NO: 1511 - RNA, 20 nt, synthetic construct
  source 1..20: mol_type = other RNA
cagatcttctcggcttagcg

SEQ ID NO: 1512 - RNA, 20 nt, synthetic construct
  source 1..20: mol_type = other RNA
cggcttagcggctgaagact

SEQ ID NO: 1513 - RNA, 20 nt, synthetic construct
  source 1..20: mol_type = other RNA
gccgctaagccgagaagatc

SEQ ID NO: 1514 - RNA, 20 nt, synthetic construct
  source 1..20: mol_type = other RNA
gaggcgatcgggcagtgtca

SEQ ID NO: 1515 - RNA, 20 nt, synthetic construct
  source 1..20: mol_type = other RNA
actgtgagagttacccaaag

SEQ ID NO: 1516 - RNA, 20 nt, synthetic construct
  source 1..20: mol_type = other RNA
taatcaatacggaggctact

SEQ ID NO: 1517 - RNA, 20 nt, synthetic construct
  source 1..20: mol_type = other RNA
tttcaagggcctgtttccct

SEQ ID NO: 1518 - RNA, 20 nt, synthetic construct
  source 1..20: mol_type = other RNA
agggcctgtttcccttgcct

SEQ ID NO: 1519 - RNA, 20 nt, synthetic construct
  source 1..20: mol_type = other RNA
cttgcctccataactgttgt

SEQ ID NO: 1520 - RNA, 20 nt, synthetic construct
  source 1..20: mol_type = other RNA
aaacctcttaaaactcccca

SEQ ID NO: 1521 - RNA, 20 nt, synthetic construct
  source 1..20: mol_type = other RNA
cttattaggctgagacactt

SEQ ID NO: 1522 - RNA, 20 nt, synthetic construct
  source 1..20: mol_type = other RNA
ctgactattcctggactaca

SEQ ID NO: 1523 - RNA, 20 nt, synthetic construct
  source 1..20: mol_type = other RNA
tggactacagctatatctca

SEQ ID NO: 1524 - RNA, 20 nt, synthetic construct
  source 1..20: mol_type = other RNA
tcccaatccaaagcctcctt

SEQ ID NO: 1525 - RNA, 20 nt, synthetic construct
  source 1..20: mol_type = other RNA
caatccaaagcctcctttgt

SEQ ID NO: 1526 - RNA, 20 nt, synthetic construct
  source 1..20: mol_type = other RNA
cccattttacctgtcctaaa

SEQ ID NO: 1527 - RNA, 20 nt, synthetic construct
  source 1..20: mol_type = other RNA
ggatctgcgccttatcaacc

SEQ ID NO: 1528 - RNA, 20 nt, synthetic construct
  source 1..20: mol_type = other RNA
gttctggatctcaaacatgc

SEQ ID NO: 1529 - RNA, 20 nt, synthetic construct
  source 1..20: mol_type = other RNA
ggatctcaaacatgctttct

SEQ ID NO: 1530 - RNA, 20 nt, synthetic construct
  source 1..20: mol_type = other RNA
ttactattcctttgcacccg

SEQ ID NO: 1531 - RNA, 20 nt, synthetic construct
  source 1..20: mol_type = other RNA
tttgcacccgtcatcccagc

SEQ ID NO: 1532 - RNA, 20 nt, synthetic construct
  source 1..20: mol_type = other RNA
ctttcactttgactgaccct

SEQ ID NO: 1533 - RNA, 20 nt, synthetic construct
  source 1..20: mol_type = other RNA
ctttgactgaccctgacacc

SEQ ID NO: 1534 - RNA, 20 nt, synthetic construct
  source 1..20: mol_type = other RNA
cagacagcccccattacttc

SEQ ID NO: 1535 - RNA, 20 nt, synthetic construct
  source 1..20: mol_type = other RNA
atcaagcccaaatttcttcc

SEQ ID NO: 1536 - RNA, 20 nt, synthetic construct
  source 1..20: mol_type = other RNA
tcctcatctgttacctatct

SEQ ID NO: 1537 - RNA, 20 nt, synthetic construct
  source 1..20: mol_type = other RNA
tcatctgttacctatcttgg

SEQ ID NO: 1538 - RNA, 20 nt, synthetic construct
  source 1..20: mol_type = other RNA
cataaaaacacatgtgctct

SEQ ID NO: 1539 - RNA, 20 nt, synthetic construct
  source 1..20: mol_type = other RNA
acaaaacaacaactcctttc

SEQ ID NO: 1540 - RNA, 20 nt, synthetic construct
  source 1..20: mol_type = other RNA
ttcctaggcatggttagcgt

SEQ ID NO: 1541 - RNA, 20 nt, synthetic construct
  source 1..20: mol_type = other RNA
taggcatggttagcgtggtc

SEQ ID NO: 1542 - RNA, 20 nt, synthetic construct
  source 1..20: mol_type = other RNA
gaccacgctaaccatgccta

SEQ ID NO: 1543 - RNA, 20 nt, synthetic construct
  source 1..20: mol_type = other RNA
tacacaagagccaggaccac

SEQ ID NO: 1544 - RNA, 20 nt, synthetic construct
  source 1..20: mol_type = other RNA
gtccaaacaacttgacctta

SEQ ID NO: 1545 - RNA, 20 nt, synthetic construct
  source 1..20: mol_type = other RNA
cataacttccaaaatctatt

SEQ ID NO: 1546 - RNA, 20 nt, synthetic construct
  source 1..20: mol_type = other RNA
aaaatctattttcttcctca

SEQ ID NO: 1547 - RNA, 20 nt, synthetic construct
  source 1..20: mol_type = other RNA
tcctcatacctgacacatat

SEQ ID NO: 1548 - RNA, 20 nt, synthetic construct
  source 1..20: mol_type = other RNA
tcatacctgacacatatact

SEQ ID NO: 1549 - RNA, 20 nt, synthetic construct
  source 1..20: mol_type = other RNA
gcttcccggctccttcagct

SEQ ID NO: 1550 - RNA, 20 nt, synthetic construct
  source 1..20: mol_type = other RNA
cggctccttcagctgtactc

SEQ ID NO: 1551 - RNA, 20 nt, synthetic construct
  source 1..20: mol_type = other RNA
gctgtactcactctttgtta

SEQ ID NO: 1552 - RNA, 20 nt, synthetic construct
  source 1..20: mol_type = other RNA
tggcccagacctcaatctgg

SEQ ID NO: 1553 - RNA, 20 nt, synthetic construct
  source 1..20: mol_type = other RNA
tgataccacacctgaccccc

SEQ ID NO: 1554 - RNA, 20 nt, synthetic construct
  source 1..20: mol_type = other RNA
ccccatttccccatatttcc

SEQ ID NO: 1555 - RNA, 20 nt, synthetic construct
  source 1..20: mol_type = other RNA
ccatatttccttctttcctg

SEQ ID NO: 1556 - RNA, 20 nt, synthetic construct
  source 1..20: mol_type = other RNA
ttctttcctgttcctcaccc

SEQ ID NO: 1557 - RNA, 20 nt, synthetic construct
  source 1..20: mol_type = other RNA
ttcctgttcctcaccctgat

SEQ ID NO: 1558 - RNA, 20 nt, synthetic construct
  source 1..20: mol_type = other RNA
tgttcctcaccctgatcatg

SEQ ID NO: 1559 - RNA, 20 nt, synthetic construct
  source 1..20: mol_type = other RNA
tcaccctgatcatgcttgat

SEQ ID NO: 1560 - RNA, 20 nt, synthetic construct
  source 1..20: mol_type = other RNA
accaggcctaatcgccacac

SEQ ID NO: 1561 - RNA, 20 nt, synthetic construct
  source 1..20: mol_type = other RNA
aagaggtgggctagtggctt

SEQ ID NO: 1562 - RNA, 20 nt, synthetic construct
  source 1..20: mol_type = other RNA
tttccatcatggaaatctat

SEQ ID NO: 1563 - RNA, 20 nt, synthetic construct
  source 1..20: mol_type = other RNA
atcatggaaatctatcctca

SEQ ID NO: 1564 - RNA, 20 nt, synthetic construct
  source 1..20: mol_type = other RNA
atgatggaaaggaaatgaga

SEQ ID NO: 1565 - RNA, 20 nt, synthetic construct
  source 1..20: mol_type = other RNA
ttgaggatagatttccatga

SEQ ID NO: 1566 - RNA, 20 nt, synthetic construct
  source 1..20: mol_type = other RNA
cagtgttccatctgctattc

SEQ ID NO: 1567 - RNA, 20 nt, synthetic construct
  source 1..20: mol_type = other RNA
atctgctattctactactcc

SEQ ID NO: 1568 - RNA, 20 nt, synthetic construct
  source 1..20: mol_type = other RNA
actactcctcagggattatt

SEQ ID NO: 1569 - RNA, 20 nt, synthetic construct
  source 1..20: mol_type = other RNA
ggacccctcccttccctaca

SEQ ID NO: 1570 - RNA, 20 nt, synthetic construct
  source 1..20: mol_type = other RNA
ctacacatcaagctcgagga

SEQ ID NO: 1571 - RNA, 20 nt, synthetic construct
  source 1..20: mol_type = other RNA
tacagggtctgagaaggcca

SEQ ID NO: 1572 - RNA, 20 nt, synthetic construct
  source 1..20: mol_type = other RNA
cagaccctgtaggaaaggcc

SEQ ID NO: 1573 - RNA, 20 nt, synthetic construct
  source 1..20: mol_type = other RNA
cttctgtcagacacaattcc

SEQ ID NO: 1574 - RNA, 20 nt, synthetic construct
  source 1..20: mol_type = other RNA
gtcagacacaattcctcagt

SEQ ID NO: 1575 - RNA, 20 nt, synthetic construct
  source 1..20: mol_type = other RNA
tcagtttagccttcccacct

SEQ ID NO: 1576 - RNA, 20 nt, synthetic construct
  source 1..20: mol_type = other RNA
cacctcaatacagtctgata

SEQ ID NO: 1577 - RNA, 20 nt, synthetic construct
  source 1..20: mol_type = other RNA
ggctcttagtattcagtgaa

SEQ ID NO: 1578 - RNA, 20 nt, synthetic construct
  source 1..20: mol_type = other RNA
gtgaaacctttatatccctt

SEQ ID NO: 1579 - RNA, 20 nt, synthetic construct
  source 1..20: mol_type = other RNA
ctgaatactaagagcctgaa

SEQ ID NO: 1580 - RNA, 20 nt, synthetic construct
  source 1..20: mol_type = other RNA
agaaaagtagaacagactaa

SEQ ID NO: 1581 - RNA, 20 nt, synthetic construct
  source 1..20: mol_type = other RNA
tgaagacggaggaccgtaag

SEQ ID NO: 1582 - RNA, 20 nt, synthetic construct
  source 1..20: mol_type = other RNA
acttttcttgaagacggagg

SEQ ID NO: 1583 - RNA, 20 nt, synthetic construct
  source 1..20: mol_type = other RNA
cttctcagaattcaggcctg

SEQ ID NO: 1584 - RNA, 20 nt, synthetic construct
  source 1..20: mol_type = other RNA
cagaattcaggcctgtcctc

SEQ ID NO: 1585 - RNA, 20 nt, synthetic construct
  source 1..20: mol_type = other RNA
gagaagggaaagtgataaaa

SEQ ID NO: 1586 - RNA, 20 nt, synthetic construct
  source 1..20: mol_type = other RNA
ggcctgtcctcggaatgcta

SEQ ID NO: 1587 - RNA, 20 nt, synthetic construct
  source 1..20: mol_type = other RNA
gaggacaggcctgaattctg

SEQ ID NO: 1588 - RNA, 20 nt, synthetic construct
  source 1..20: mol_type = other RNA
agacaccagaccaacttgga

SEQ ID NO: 1589 - RNA, 20 nt, synthetic construct
  source 1..20: mol_type = other RNA
ggggcacagtccaagttggt

SEQ ID NO: 1590 - RNA, 20 nt, synthetic construct
  source 1..20: mol_type = other RNA
gtctagtcatactcctattc

SEQ ID NO: 1591 - RNA, 20 nt, synthetic construct
  source 1..20: mol_type = other RNA
ccgttctcaactactcatac

SEQ ID NO: 1592 - RNA, 20 nt, synthetic construct
  source 1..20: mol_type = other RNA
caactactcatacatgccct

SEQ ID NO: 1593 - RNA, 20 nt, synthetic construct
  source 1..20: mol_type = other RNA
ccaagccatcacagctgata

SEQ ID NO: 1594 - RNA, 20 nt, synthetic construct
  source 1..20: mol_type = other RNA
agagttaagagtggcagttt

SEQ ID NO: 1595 - RNA, 20 nt, synthetic construct
  source 1..20: mol_type = other RNA
gcatagtcctgccagcaaag

SEQ ID NO: 1596 - RNA, 20 nt, synthetic construct
  source 1..20: mol_type = other RNA
tagtccttttatacctgttt

SEQ ID NO: 1597 - RNA, 20 nt, synthetic construct
  source 1..20: mol_type = other RNA
ccttctcttattccatttag

SEQ ID NO: 1598 - RNA, 20 nt, synthetic construct
  source 1..20: mol_type = other RNA
cttattccatttagtttttc

SEQ ID NO: 1599 - RNA, 20 nt, synthetic construct
  source 1..20: mol_type = other RNA
atttagtttttcaattcata

SEQ ID NO: 1600 - RNA, 20 nt, synthetic construct
  source 1..20: mol_type = other RNA
attcatacaaaaccgtatcc

SEQ ID NO: 1601 - RNA, 20 nt, synthetic construct
  source 1..20: mol_type = other RNA
tacaaaaccgtatccaggcc

SEQ ID NO: 1602 - RNA, 20 nt, synthetic construct
  source 1..20: mol_type = other RNA
atacgacaaacgtttcttct

SEQ ID NO: 1603 - RNA, 20 nt, synthetic construct
  source 1..20: mol_type = other RNA
tctaacatccccacaatatc

SEQ ID NO: 1604 - RNA, 20 nt, synthetic construct
  source 1..20: mol_type = other RNA
aacatccccacaatatcacc

SEQ ID NO: 1605 - RNA, 20 nt, synthetic construct
  source 1..20: mol_type = other RNA
gcttaatctctcccattcta

SEQ ID NO: 1606 - RNA, 20 nt, synthetic construct
  source 1..20: mol_type = other RNA
aggttcccacgccgccccta

SEQ ID NO: 1607 - RNA, 20 nt, synthetic construct
  source 1..20: mol_type = other RNA
cacgccgcccctaatcccgc

SEQ ID NO: 1608 - RNA, 20 nt, synthetic construct
  source 1..20: mol_type = other RNA
agcgggattaggggcggcgt

SEQ ID NO: 1609 - RNA, 20 nt, synthetic construct
  source 1..20: mol_type = other RNA
cagggctgcttcaagcggga

SEQ ID NO: 1610 - RNA, 20 nt, synthetic construct
  source 1..20: mol_type = other RNA
ctctccataccaccccccaa

SEQ ID NO: 1611 - RNA, 20 nt, synthetic construct
  source 1..20: mol_type = other RNA
ccgccccaacacttcaacac

SEQ ID NO: 1612 - RNA, 20 nt, synthetic construct
  source 1..20: mol_type = other RNA
acactattttatttttctta

SEQ ID NO: 1613 - RNA, 20 nt, synthetic construct
  source 1..20: mol_type = other RNA
tattaatataagaaggcagg

SEQ ID NO: 1614 - RNA, 20 nt, synthetic construct
  source 1..20: mol_type = other RNA
tatattaataagaaaaataa

SEQ ID NO: 1615 - RNA, 20 nt, synthetic construct
  source 1..20: mol_type = other RNA
tgccttcttatattaataag

SEQ ID NO: 1616 - RNA, 20 nt, synthetic construct
  source 1..20: mol_type = other RNA
ggccatctgggcgtatacat

SEQ ID NO: 1617 - RNA, 20 nt, synthetic construct
  source 1..20: mol_type = other RNA
gttacttcaggccatctggg

SEQ ID NO: 1618 - RNA, 20 nt, synthetic construct
  source 1..20: mol_type = other RNA
tcagttacttcaggccatct

SEQ ID NO: 1619 - RNA, 20 nt, synthetic construct
  source 1..20: mol_type = other RNA
tttgtgattcttcagttact

SEQ ID NO: 1620 - RNA, 20 nt, synthetic construct
  source 1..20: mol_type = other RNA
cttcttttgtgattcttcag

SEQ ID NO: 1621 - RNA, 20 nt, synthetic construct
  source 1..20: mol_type = other RNA
accacaaaagaagtgtaaat

SEQ ID NO: 1622 - RNA, 20 nt, synthetic construct
  source 1..20: mol_type = other RNA
tttgtggtggaatgtcatca

SEQ ID NO: 1623 - RNA, 20 nt, synthetic construct
  source 1..20: mol_type = other RNA
caaggtaatgtcatcagtta

SEQ ID NO: 1624 - RNA, 20 nt, synthetic construct
  source 1..20: mol_type = other RNA
ctggttcatcctggctcaaa

SEQ ID NO: 1625 - RNA, 20 nt, synthetic construct
  source 1..20: mol_type = other RNA
tcctggctcaaaaagcaccc

SEQ ID NO: 1626 - RNA, 20 nt, synthetic construct
  source 1..20: mol_type = other RNA
tttacctacccaaatcctat

SEQ ID NO: 1627 - RNA, 20 nt, synthetic construct
  source 1..20: mol_type = other RNA
ctgactctcttttcggactc

SEQ ID NO: 1628 - RNA, 20 nt, synthetic construct
  source 1..20: mol_type = other RNA
gactcagcccacctgcaccc

SEQ ID NO: 1629 - RNA, 20 nt, synthetic construct
  source 1..20: mol_type = other RNA
cctgggtgcaggtgggctga

SEQ ID NO: 1630 - RNA, 20 nt, synthetic construct
  source 1..20: mol_type = other RNA
cacggacgcgcatgaaatct

SEQ ID NO: 1631 - RNA, 20 nt, synthetic construct
  source 1..20: mol_type = other RNA
tgcgcgtccgtgtgaagaga

SEQ ID NO: 1632 - RNA, 20 nt, synthetic construct
  source 1..20: mol_type = other RNA
ccagatttcatgcgcgtccg

SEQ ID NO: 1633 - RNA, 20 nt, synthetic construct
  source 1..20: mol_type = other RNA
cattcactccccactcactc

SEQ ID NO: 1634 - RNA, 20 nt, synthetic construct
  source 1..20: mol_type = other RNA
ctccccactcactcactgac

SEQ ID NO: 1635 - RNA, 20 nt, synthetic construct
  source 1..20: mol_type = other RNA
agtcctgcaagctctgttca

SEQ ID NO: 1636 - RNA, 20 nt, synthetic construct
  source 1..20: mol_type = other RNA
tgctaagtgccctacacaga

SEQ ID NO: 1637 - RNA, 20 nt, synthetic construct
  source 1..20: mol_type = other RNA
cttttacattttatttttac

SEQ ID NO: 1638 - RNA, 20 nt, synthetic construct
  source 1..20: mol_type = other RNA
atgtttagattttttttttt

SEQ ID NO: 1639 - RNA, 20 nt, synthetic construct
  source 1..20: mol_type = other RNA
tgccattctcctgcctcagc

SEQ ID NO: 1640 - RNA, 20 nt, synthetic construct
  source 1..20: mol_type = other RNA
cctgcctcagcctcccgagt

SEQ ID NO: 1641 - RNA, 20 nt, synthetic construct
  source 1..20: mol_type = other RNA
actaaaaatacaaaaaacca

SEQ ID NO: 1642 - RNA, 20 nt, synthetic construct
  source 1..20: mol_type = other RNA
ccatgttagccaggatggtc

SEQ ID NO: 1643 - RNA, 20 nt, synthetic construct
  source 1..20: mol_type = other RNA
gcactgtgctgtacaagtct

SEQ ID NO: 1644 - RNA, 20 nt, synthetic construct
  source 1..20: mol_type = other RNA
caccatgacaaaattgccag

SEQ ID NO: 1645 - RNA, 20 nt, synthetic construct
  source 1..20: mol_type = other RNA
atacagtcatgcatccatat

SEQ ID NO: 1646 - RNA, 20 nt, synthetic construct
  source 1..20: mol_type = other RNA
tgtcatcagattacaccgga

SEQ ID NO: 1647 - RNA, 20 nt, synthetic construct
  source 1..20: mol_type = other RNA
ggtgtaatctgatgacagga

SEQ ID NO: 1648 - RNA, 20 nt, synthetic construct
  source 1..20: mol_type = other RNA
cctgctgggggatttcagcg

SEQ ID NO: 1649 - RNA, 20 nt, synthetic construct
  source 1..20: mol_type = other RNA
gcgtgtttctagagagtcgg

SEQ ID NO: 1650 - RNA, 20 nt, synthetic construct
  source 1..20: mol_type = other RNA
agagagtcggttgcacgctc

SEQ ID NO: 1651 - RNA, 20 nt, synthetic construct
  source 1..20: mol_type = other RNA
acctccagagaccttgcctg

SEQ ID NO: 1652 - RNA, 20 nt, synthetic construct
  source 1..20: mol_type = other RNA
gccttccattcccacctgca

SEQ ID NO: 1653 - RNA, 20 nt, synthetic construct
  source 1..20: mol_type = other RNA
attcccacctgcatactctt

SEQ ID NO: 1654 - RNA, 20 nt, synthetic construct
  source 1..20: mol_type = other RNA
cacctgcatactcttgccct

SEQ ID NO: 1655 - RNA, 20 nt, synthetic construct
  source 1..20: mol_type = other RNA
ggaggagcttgttatcgtag

SEQ ID NO: 1656 - RNA, 20 nt, synthetic construct
  source 1..20: mol_type = other RNA
aaacacgccctttctgacca

SEQ ID NO: 1657 - RNA, 20 nt, synthetic construct
  source 1..20: mol_type = other RNA
gaccaccactttccttttct

SEQ ID NO: 1658 - RNA, 20 nt, synthetic construct
  source 1..20: mol_type = other RNA
ttttctcccaactccaatat

SEQ ID NO: 1659 - RNA, 20 nt, synthetic construct
  source 1..20: mol_type = other RNA
cccaactccaatattttcat

SEQ ID NO: 1660 - RNA, 20 nt, synthetic construct
  source 1..20: mol_type = other RNA
ttgacgccagcctttcacgt

SEQ ID NO: 1661 - RNA, 20 nt, synthetic construct
  source 1..20: mol_type = other RNA
cgtctgcctctcactcacct

SEQ ID NO: 1662 - RNA, 20 nt, synthetic construct
  source 1..20: mol_type = other RNA
tggtccagtctgccatccac

SEQ ID NO: 1663 - RNA, 20 nt, synthetic construct
  source 1..20: mol_type = other RNA
cctctgtgagtacaataact

SEQ ID NO: 1664 - RNA, 20 nt, synthetic construct
  source 1..20: mol_type = other RNA
ctctggctgtgctcagccgc

SEQ ID NO: 1665 - RNA, 20 nt, synthetic construct
  source 1..20: mol_type = other RNA
ggtctcactcacaaaccact

SEQ ID NO: 1666 - RNA, 20 nt, synthetic construct
  source 1..20: mol_type = other RNA
aagtccatttctctgcctga

SEQ ID NO: 1667 - RNA, 20 nt, synthetic construct
  source 1..20: mol_type = other RNA
ctgcctgacttatttatttt

SEQ ID NO: 1668 - RNA, 20 nt, synthetic construct
  source 1..20: mol_type = other RNA
aagcatgttattatcaagta

SEQ ID NO: 1669 - RNA, 20 nt, synthetic construct
  source 1..20: mol_type = other RNA
gtaactattgccatttcaca

SEQ ID NO: 1670 - RNA, 20 nt, synthetic construct
  source 1..20: mol_type = other RNA
cagacgaagagatagacaca

SEQ ID NO: 1671 - RNA, 20 nt, synthetic construct
  source 1..20: mol_type = other RNA
tctgtgaaatggcaatagtt

SEQ ID NO: 1672 - RNA, 20 nt, synthetic construct
  source 1..20: mol_type = other RNA
tgtgtgtctatctcttcgtc

SEQ ID NO: 1673 - RNA, 20 nt, synthetic construct
  source 1..20: mol_type = other RNA
cctttctccttaaaccccca

SEQ ID NO: 1674 - RNA, 20 nt, synthetic construct
  source 1..20: mol_type = other RNA
ccttaaacccccaaatcctt

SEQ ID NO: 1675 - RNA, 20 nt, synthetic construct
  source 1..20: mol_type = other RNA
cccccagcctgccttatagt

SEQ ID NO: 1676 - RNA, 20 nt, synthetic construct
  source 1..20: mol_type = other RNA
tattccaatgagaaaataga

SEQ ID NO: 1677 - RNA, 20 nt, synthetic construct
  source 1..20: mol_type = other RNA
aatgagaaaatagactcaat

SEQ ID NO: 1678 - RNA, 20 nt, synthetic construct
  source 1..20: mol_type = other RNA
cattggaataggaagcaagg

SEQ ID NO: 1679 - RNA, 20 nt, synthetic construct
  source 1..20: mol_type = other RNA
ctctttattgagtctatttt

SEQ ID NO: 1680 - RNA, 20 nt, synthetic construct
  source 1..20: mol_type = other RNA
accttcccctgtgattatgg

SEQ ID NO: 1681 - RNA, 20 nt, synthetic construct
  source 1..20: mol_type = other RNA
cctgtgattatggctgcacc

SEQ ID NO: 1682 - RNA, 20 nt, synthetic construct
  source 1..20: mol_type = other RNA
acctgtgcactaggatccat

SEQ ID NO: 1683 - RNA, 20 nt, synthetic construct
  source 1..20: mol_type = other RNA
cacctcctaagagatgctcc

SEQ ID NO: 1684 - RNA, 20 nt, synthetic construct
  source 1..20: mol_type = other RNA
ctgtctcaactgtaacactt

SEQ ID NO: 1685 - RNA, 20 nt, synthetic construct
  source 1..20: mol_type = other RNA
atcagctctgggccatcatc

SEQ ID NO: 1686 - RNA, 20 nt, synthetic construct
  source 1..20: mol_type = other RNA
tgcttccccaaggatatagg

SEQ ID NO: 1687 - RNA, 20 nt, synthetic construct
  source 1..20: mol_type = other RNA
ccaaggatatagggaaaacc

SEQ ID NO: 1688 - RNA, 20 nt, synthetic construct
  source 1..20: mol_type = other RNA
ctatatccttggggaagcag

SEQ ID NO: 1689 - RNA, 20 nt, synthetic construct
  source 1..20: mol_type = other RNA
aggttttccctatatccttg

SEQ ID NO: 1690 - RNA, 20 nt, synthetic construct
  source 1..20: mol_type = other RNA
tgcattgtctctacacaggc

SEQ ID NO: 1691 - RNA, 20 nt, synthetic construct
  source 1..20: mol_type = other RNA
tggtgatctccacatggcta

SEQ ID NO: 1692 - RNA, 20 nt, synthetic construct
  source 1..20: mol_type = other RNA
gatttagccatgtggagatc

SEQ ID NO: 1693 - RNA, 20 nt, synthetic construct
  source 1..20: mol_type = other RNA
tttctcaccttgcttgtccc

SEQ ID NO: 1694 - RNA, 20 nt, synthetic construct
  source 1..20: mol_type = other RNA
caccttgcttgtcccgtggg

SEQ ID NO: 1695 - RNA, 20 nt, synthetic construct
  source 1..20: mol_type = other RNA
tcctcctggacatgctccct

SEQ ID NO: 1696 - RNA, 20 nt, synthetic construct
  source 1..20: mol_type = other RNA
atgacaggggactcacagag

SEQ ID NO: 1697 - RNA, 20 nt, synthetic construct
  source 1..20: mol_type = other RNA
agcccagcatctcccctaag

SEQ ID NO: 1698 - RNA, 20 nt, synthetic construct
  source 1..20: mol_type = other RNA
atgtgacaccttggccatct

SEQ ID NO: 1699 - RNA, 20 nt, synthetic construct
  source 1..20: mol_type = other RNA
ccagatggccaaggtgtcac

SEQ ID NO: 1700 - RNA, 20 nt, synthetic construct
  source 1..20: mol_type = other RNA
gggtgcatgggtttgagcca

SEQ ID NO: 1701 - RNA, 20 nt, synthetic construct
  source 1..20: mol_type = other RNA
ccactaagccactcctctct

SEQ ID NO: 1702 - RNA, 20 nt, synthetic construct
  source 1..20: mol_type = other RNA
aaatagcactcacagcaatc

SEQ ID NO: 1703 - RNA, 20 nt, synthetic construct
  source 1..20: mol_type = other RNA
ctgtgtccccattcaaatct

SEQ ID NO: 1704 - RNA, 20 nt, synthetic construct
  source 1..20: mol_type = other RNA
aatctcagcttgaattgtat

SEQ ID NO: 1705 - RNA, 20 nt, synthetic construct
  source 1..20: mol_type = other RNA
agctgagatttgaatgggga

SEQ ID NO: 1706 - RNA, 20 nt, synthetic construct
  source 1..20: mol_type = other RNA
cagaattcccacgtgttgtg

SEQ ID NO: 1707 - RNA, 20 nt, synthetic construct
  source 1..20: mol_type = other RNA
gggaaatacaattcaagctg

SEQ ID NO: 1708 - RNA, 20 nt, synthetic construct
  source 1..20: mol_type = other RNA
cacgtgttgtgggagggacc

SEQ ID NO: 1709 - RNA, 20 nt, synthetic construct
  source 1..20: mol_type = other RNA
attacctccccctgggtccc

SEQ ID NO: 1710 - RNA, 20 nt, synthetic construct
  source 1..20: mol_type = other RNA
catgctattctcatggtagt

SEQ ID NO: 1711 - RNA, 20 nt, synthetic construct
  source 1..20: mol_type = other RNA
catggtagtgaataagtctc

SEQ ID NO: 1712 - RNA, 20 nt, synthetic construct
  source 1..20: mol_type = other RNA
ctaccatgagaatagcatgg

SEQ ID NO: 1713 - RNA, 20 nt, synthetic construct
  source 1..20: mol_type = other RNA
atttttgcttcctcctcatt

SEQ ID NO: 1714 - RNA, 20 nt, synthetic construct
  source 1..20: mol_type = other RNA
tcctcattttctcttgcctc

SEQ ID NO: 1715 - RNA, 20 nt, synthetic construct
  source 1..20: mol_type = other RNA
cttgcctccgccatgtaaga

SEQ ID NO: 1716 - RNA, 20 nt, synthetic construct
  source 1..20: mol_type = other RNA
tacatggcggaggcaagaga

SEQ ID NO: 1717 - RNA, 20 nt, synthetic construct
  source 1..20: mol_type = other RNA
tttcccgtcatgattctgag

SEQ ID NO: 1718 - RNA, 20 nt, synthetic construct
  source 1..20: mol_type = other RNA
cgtcatgattctgagacctc

SEQ ID NO: 1719 - RNA, 20 nt, synthetic construct
  source 1..20: mol_type = other RNA
gagacctccgcagccacgtg

SEQ ID NO: 1720 - RNA, 20 nt, synthetic construct
  source 1..20: mol_type = other RNA
acgtggctgcggaggtctca

SEQ ID NO: 1721 - RNA, 20 nt, synthetic construct
  source 1..20: mol_type = other RNA
tcctagtctcaggtatgtct

SEQ ID NO: 1722 - RNA, 20 nt, synthetic construct
  source 1..20: mol_type = other RNA
tagtctcaggtatgtcttta

SEQ ID NO: 1723 - RNA, 20 nt, synthetic construct
  source 1..20: mol_type = other RNA
ggtatcttttaagcaacacc

SEQ ID NO: 1724 - RNA, 20 nt, synthetic construct
  source 1..20: mol_type = other RNA
acattttcaggtatctttta

SEQ ID NO: 1725 - RNA, 20 nt, synthetic construct
  source 1..20: mol_type = other RNA
aagtcatttccacattttca

SEQ ID NO: 1726 - RNA, 20 nt, synthetic construct
  source 1..20: mol_type = other RNA
gcctgttacccaatttcaaa

SEQ ID NO: 1727 - RNA, 20 nt, synthetic construct
  source 1..20: mol_type = other RNA
aaattctgcctgttacccaa

SEQ ID NO: 1728 - RNA, 20 nt, synthetic construct
  source 1..20: mol_type = other RNA
gagccctccaaactgttcca

SEQ ID NO: 1729 - RNA, 20 nt, synthetic construct
  source 1..20: mol_type = other RNA
tctgagccctccaaactgtt

SEQ ID NO: 1730 - RNA, 20 nt, synthetic construct
  source 1..20: mol_type = other RNA
tgtcttcttctgagccctcc

SEQ ID NO: 1731 - RNA, 20 nt, synthetic construct
  source 1..20: mol_type = other RNA
cacattttcctgtcttcttc

SEQ ID NO: 1732 - RNA, 20 nt, synthetic construct
  source 1..20: mol_type = other RNA
aaactttctcacattttcct

SEQ ID NO: 1733 - RNA, 20 nt, synthetic construct
  source 1..20: mol_type = other RNA
tagagacttgttcaatggct

SEQ ID NO: 1734 - RNA, 20 nt, synthetic construct
  source 1..20: mol_type = other RNA
atggctttgacaaaaatact

SEQ ID NO: 1735 - RNA, 20 nt, synthetic construct
  source 1..20: mol_type = other RNA
tatcactatgagtatttttg

SEQ ID NO: 1736 - RNA, 20 nt, synthetic construct
  source 1..20: mol_type = other RNA
tcatctgccccctctgagac

SEQ ID NO: 1737 - RNA, 20 nt, synthetic construct
  source 1..20: mol_type = other RNA
caacaagttcctcatctgcc

SEQ ID NO: 1738 - RNA, 20 nt, synthetic construct
  source 1..20: mol_type = other RNA
gcaaatctcaagggcagggg

SEQ ID NO: 1739 - RNA, 20 nt, synthetic construct
  source 1..20: mol_type = other RNA
acgttccgcaaatctcaagg

SEQ ID NO: 1740 - RNA, 20 nt, synthetic construct
  source 1..20: mol_type = other RNA
accagataccctaaatcgtc

SEQ ID NO: 1741 - RNA, 20 nt, synthetic construct
  source 1..20: mol_type = other RNA
tccaccagataccctaaatc

SEQ ID NO: 1742 - RNA, 20 nt, synthetic construct
  source 1..20: mol_type = other RNA
aagcagcaaagcattcaaga

SEQ ID NO: 1743 - RNA, 20 nt, synthetic construct
  source 1..20: mol_type = other RNA
agaggtgacttgggtactgt

SEQ ID NO: 1744 - RNA, 20 nt, synthetic construct
  source 1..20: mol_type = other RNA
gttttgaacgggaagcagag

SEQ ID NO: 1745 - RNA, 20 nt, synthetic construct
  source 1..20: mol_type = other RNA
aaacagaatgtttttaacag

SEQ ID NO: 1746 - RNA, 20 nt, synthetic construct
  source 1..20: mol_type = other RNA
cgttcaaaacagaatgtttt

SEQ ID NO: 1747 - RNA, 20 nt, synthetic construct
  source 1..20: mol_type = other RNA
gaaaatttgcagcctaatat

SEQ ID NO: 1748 - RNA, 20 nt, synthetic construct
  source 1..20: mol_type = other RNA
gaacttttgtgctctgcttc

SEQ ID NO: 1749 - RNA, 20 nt, synthetic construct
  source 1..20: mol_type = other RNA
actgcaatattaggctgcaa

SEQ ID NO: 1750 - RNA, 20 nt, synthetic construct
  source 1..20: mol_type = other RNA
tttctactgcaatattaggc

SEQ ID NO: 1751 - RNA, 20 nt, synthetic construct
  source 1..20: mol_type = other RNA
cctcaaaaaatgggtttttc

SEQ ID NO: 1752 - RNA, 20 nt, synthetic construct
  source 1..20: mol_type = other RNA
agccagctgcagaaatttgc

SEQ ID NO: 1753 - RNA, 20 nt, synthetic construct
  source 1..20: mol_type = other RNA
gcagctggcttgaatttctc

SEQ ID NO: 1754 - RNA, 20 nt, synthetic construct
  source 1..20: mol_type = other RNA
ccatggttttgaggattaac

SEQ ID NO: 1755 - RNA, 20 nt, synthetic construct
  source 1..20: mol_type = other RNA
caacagctcctcccatcaca

SEQ ID NO: 1756 - RNA, 20 nt, synthetic construct
  source 1..20: mol_type = other RNA
tcctggggctctaggcctgt

SEQ ID NO: 1757 - RNA, 20 nt, synthetic construct
  source 1..20: mol_type = other RNA
tgtgctgtgtgcagcccagg

SEQ ID NO: 1758 - RNA, 20 nt, synthetic construct
  source 1..20: mol_type = other RNA
gccatgcctggagcagctgg

SEQ ID NO: 1759 - RNA, 20 nt, synthetic construct
  source 1..20: mol_type = other RNA
gaggtggaagccccaagact

SEQ ID NO: 1760 - RNA, 20 nt, synthetic construct
  source 1..20: mol_type = other RNA
acctctgaagccacagccca

SEQ ID NO: 1761 - RNA, 20 nt, synthetic construct
  source 1..20: mol_type = other RNA
atgtggtgttgagcctgcag

SEQ ID NO: 1762 - RNA, 20 nt, synthetic construct
  source 1..20: mol_type = other RNA
gtgcacctgcaggctcaaca

SEQ ID NO: 1763 - RNA, 20 nt, synthetic construct
  source 1..20: mol_type = other RNA
tgacttctgtgcacctgcag

SEQ ID NO: 1764 - RNA, 20 nt, synthetic construct
  source 1..20: mol_type = other RNA
caaacctcaattcttgactt

SEQ ID NO: 1765 - RNA, 20 nt, synthetic construct
  source 1..20: mol_type = other RNA
gaagacgtaggaaatgcttg

SEQ ID NO: 1766 - RNA, 20 nt, synthetic construct
  source 1..20: mol_type = other RNA
gaaatctaggtggaggttcc

SEQ ID NO: 1767 - RNA, 20 nt, synthetic construct
  source 1..20: mol_type = other RNA
tacgtcttctgaaatctagg

SEQ ID NO: 1768 - RNA, 20 nt, synthetic construct
  source 1..20: mol_type = other RNA
gcctggacatccaagcattt

SEQ ID NO: 1769 - RNA, 20 nt, synthetic construct
  source 1..20: mol_type = other RNA
gggtggggtgctcatggaga

SEQ ID NO: 1770 - RNA, 20 nt, synthetic construct
  source 1..20: mol_type = other RNA
ccatgagcaccccaccctga

SEQ ID NO: 1771 - RNA, 20 nt, synthetic construct
  source 1..20: mol_type = other RNA
gcactgtcctaccagaggtt

SEQ ID NO: 1772 - RNA, 20 nt, synthetic construct
  source 1..20: mol_type = other RNA
cttctgcactgtcctaccag

SEQ ID NO: 1773 - RNA, 20 nt, synthetic construct
  source 1..20: mol_type = other RNA
gtctgggggctgtgacccca

SEQ ID NO: 1774 - RNA, 20 nt, synthetic construct
  source 1..20: mol_type = other RNA
ggggtctggaggacagtggc

SEQ ID NO: 1775 - RNA, 20 nt, synthetic construct
  source 1..20: mol_type = other RNA
cctggaaaatctgcagacaa

SEQ ID NO: 1776 - RNA, 20 nt, synthetic construct
  source 1..20: mol_type = other RNA
aggagaacagtgcaagttgt

SEQ ID NO: 1777 - RNA, 20 nt, synthetic construct
  source 1..20: mol_type = other RNA
tgggctggcattgattgtct

SEQ ID NO: 1778 - RNA, 20 nt, synthetic construct
  source 1..20: mol_type = other RNA
catggtcttgggcagctctg

SEQ ID NO: 1779 - RNA, 20 nt, synthetic construct
  source 1..20: mol_type = other RNA
cccatttggaatggctgtat

SEQ ID NO: 1780 - RNA, 20 nt, synthetic construct
  source 1..20: mol_type = other RNA
aaatgggagaaattggccaa

SEQ ID NO: 1781 - RNA, 20 nt, synthetic construct
  source 1..20: mol_type = other RNA
agatacaatagggatacagg

SEQ ID NO: 1782 - RNA, 20 nt, synthetic construct
  source 1..20: mol_type = other RNA
attttacaggctcataggtg

SEQ ID NO: 1783 - RNA, 20 nt, synthetic construct
  source 1..20: mol_type = other RNA
acctatgagcctgtaaaatc

SEQ ID NO: 1784 - RNA, 20 nt, synthetic construct
  source 1..20: mol_type = other RNA
gcattgacccaaaagtccac

SEQ ID NO: 1785 - RNA, 20 nt, synthetic construct
  source 1..20: mol_type = other RNA
caacagtctctcaaagtttt

SEQ ID NO: 1786 - RNA, 20 nt, synthetic construct
  source 1..20: mol_type = other RNA
aaaccaatcatgccttccca

SEQ ID NO: 1787 - RNA, 20 nt, synthetic construct
  source 1..20: mol_type = other RNA
tgtcctcacatttcaaaacc

SEQ ID NO: 1788 - RNA, 20 nt, synthetic construct
  source 1..20: mol_type = other RNA
gcccctgacccctccaaatt

SEQ ID NO: 1789 - RNA, 20 nt, synthetic construct
  source 1..20: mol_type = other RNA
actcgcagcttgaattgtgt

SEQ ID NO: 1790 - RNA, 20 nt, synthetic construct
  source 1..20: mol_type = other RNA
agctgcgagttgaatggcaa

SEQ ID NO: 1791 - RNA, 20 nt, synthetic construct
  source 1..20: mol_type = other RNA
gggagacacaattcaagctg

SEQ ID NO: 1792 - RNA, 20 nt, synthetic construct
  source 1..20: mol_type = other RNA
cacatgttgtgggagggagc

SEQ ID NO: 1793 - RNA, 20 nt, synthetic construct
  source 1..20: mol_type = other RNA
attacctctccctggctccc

SEQ ID NO: 1794 - RNA, 20 nt, synthetic construct
  source 1..20: mol_type = other RNA
catgctattctcgtgatagt

SEQ ID NO: 1795 - RNA, 20 nt, synthetic construct
  source 1..20: mol_type = other RNA
cgtgatagtgaataagtctc

SEQ ID NO: 1796 - RNA, 20 nt, synthetic construct
  source 1..20: mol_type = other RNA
ctatcacgagaatagcatgg

SEQ ID NO: 1797 - RNA, 20 nt, synthetic construct
  source 1..20: mol_type = other RNA
gcttttgtatcctttttatt

SEQ ID NO: 1798 - RNA, 20 nt, synthetic construct
  source 1..20: mol_type = other RNA
cttgctgttgccatgtaaga

SEQ ID NO: 1799 - RNA, 20 nt, synthetic construct
  source 1..20: mol_type = other RNA
tacatggcaacagcaagaga

SEQ ID NO: 1800 - RNA, 20 nt, synthetic construct
  source 1..20: mol_type = other RNA
cctcctgccgtgattctgag

SEQ ID NO: 1801 - RNA, 20 nt, synthetic construct
  source 1..20: mol_type = other RNA
gaggcctgcccagccatgtg

SEQ ID NO: 1802 - RNA, 20 nt, synthetic construct
  source 1..20: mol_type = other RNA
acatggctgggcaggcctca

SEQ ID NO: 1803 - RNA, 20 nt, synthetic construct
  source 1..20: mol_type = other RNA
tcccagtcttgggtatgtct

SEQ ID NO: 1804 - RNA, 20 nt, synthetic construct
  source 1..20: mol_type = other RNA
cagtcttgggtatgtcttta

SEQ ID NO: 1805 - RNA, 20 nt, synthetic construct
  source 1..20: mol_type = other RNA
tgctgctgataaagacatac

SEQ ID NO: 1806 - RNA, 20 nt, synthetic construct
  source 1..20: mol_type = other RNA
ttttcatgctgctgataaag

SEQ ID NO: 1807 - RNA, 20 nt, synthetic construct
  source 1..20: mol_type = other RNA
cggagaaaagccagagtccc

SEQ ID NO: 1808 - RNA, 20 nt, synthetic construct
  source 1..20: mol_type = other RNA
ccgggaaggtggagagctaa

SEQ ID NO: 1809 - RNA, 20 nt, synthetic construct
  source 1..20: mol_type = other RNA
ggggactctggcttttctcc

SEQ ID NO: 1810 - RNA, 20 nt, synthetic construct
  source 1..20: mol_type = other RNA
ttgcaggctccttcccatct

SEQ ID NO: 1811 - RNA, 20 nt, synthetic construct
  source 1..20: mol_type = other RNA
catctctgggctgttccagt

SEQ ID NO: 1812 - RNA, 20 nt, synthetic construct
  source 1..20: mol_type = other RNA
agtctggggcagcacttctc

SEQ ID NO: 1813 - RNA, 20 nt, synthetic construct
  source 1..20: mol_type = other RNA
ccactgtgtccacggcccgt

SEQ ID NO: 1814 - RNA, 20 nt, synthetic construct
  source 1..20: mol_type = other RNA
tccagtgttctctttgcaca

SEQ ID NO: 1815 - RNA, 20 nt, synthetic construct
  source 1..20: mol_type = other RNA
ctttgcacaccgccctgttt

SEQ ID NO: 1816 - RNA, 20 nt, synthetic construct
  source 1..20: mol_type = other RNA
cttttccttttcctccatgg

SEQ ID NO: 1817 - RNA, 20 nt, synthetic construct
  source 1..20: mol_type = other RNA
ttttcctccatggcactcat

SEQ ID NO: 1818 - RNA, 20 nt, synthetic construct
  source 1..20: mol_type = other RNA
tccatggcactcatcaccat

SEQ ID NO: 1819 - RNA, 20 nt, synthetic construct
  source 1..20: mol_type = other RNA
gccctactagagggagggct

SEQ ID NO: 1820 - RNA, 20 nt, synthetic construct
  source 1..20: mol_type = other RNA
atggatcttgttcactgcca

SEQ ID NO: 1821 - RNA, 20 nt, synthetic construct
  source 1..20: mol_type = other RNA
ctgccatacccagcatctag

SEQ ID NO: 1822 - RNA, 20 nt, synthetic construct
  source 1..20: mol_type = other RNA
agatgctgggtatggcagtg

SEQ ID NO: 1823 - RNA, 20 nt, synthetic construct
  source 1..20: mol_type = other RNA
gtaattaactcagtcattaa

SEQ ID NO: 1824 - RNA, 20 nt, synthetic construct
  source 1..20: mol_type = other RNA
ctgcttatactgagttcacg

SEQ ID NO: 1825 - RNA, 20 nt, synthetic construct
  source 1..20: mol_type = other RNA
cgacccgtggggaagacaga

SEQ ID NO: 1826 - RNA, 20 nt, synthetic construct
  source 1..20: mol_type = other RNA
ccacgggtcgtgaactcagt

SEQ ID NO: 1827 - RNA, 20 nt, synthetic construct
  source 1..20: mol_type = other RNA
atgtagcccctactgcacat

SEQ ID NO: 1828 - RNA, 20 nt, synthetic construct
  source 1..20: mol_type = other RNA
tcccatgtgcagtaggggct

SEQ ID NO: 1829 - RNA, 20 nt, synthetic construct
  source 1..20: mol_type = other RNA
catagccccagagggcaagg

SEQ ID NO: 1830 - RNA, 20 nt, synthetic construct
  source 1..20: mol_type = other RNA
agctgtttcccatagcccca

SEQ ID NO: 1831 - RNA, 20 nt, synthetic construct
  source 1..20: mol_type = other RNA
tgtctattaaacagagatga

SEQ ID NO: 1832 - RNA, 20 nt, synthetic construct
  source 1..20: mol_type = other RNA
ccccagccctgtgggacatg

SEQ ID NO: 1833 - RNA, 20 nt, synthetic construct
  source 1..20: mol_type = other RNA
tgtctcattcgccccagccc

SEQ ID NO: 1834 - RNA, 20 nt, synthetic construct
  source 1..20: mol_type = other RNA
tccttcctgtctcattcgcc

SEQ ID NO: 1835 - RNA, 20 nt, synthetic construct
  source 1..20: mol_type = other RNA
aagtgctccaagagaggagc

SEQ ID NO: 1836 - RNA, 20 nt, synthetic construct
  source 1..20: mol_type = other RNA
gaggtggagtctcactctgt

SEQ ID NO: 1837 - RNA, 20 nt, synthetic construct
  source 1..20: mol_type = other RNA
gctgggcaacagagtgagac

SEQ ID NO: 1838 - RNA, 20 nt, synthetic construct
  source 1..20: mol_type = other RNA
agcaattcccctgccccagc

SEQ ID NO: 1839 - RNA, 20 nt, synthetic construct
  source 1..20: mol_type = other RNA
cctgccccagcctccctagt

SEQ ID NO: 1840 - RNA, 20 nt, synthetic construct
  source 1..20: mol_type = other RNA
agaccagcctggccaacatg

SEQ ID NO: 1841 - RNA, 20 nt, synthetic construct
  source 1..20: mol_type = other RNA
acagttatatcatgtttaaa

SEQ ID NO: 1842 - RNA, 20 nt, synthetic construct
  source 1..20: mol_type = other RNA
atttggggtctgtaccttaa

SEQ ID NO: 1843 - RNA, 20 nt, synthetic construct
  source 1..20: mol_type = other RNA
ataaagtggttacatttgta

SEQ ID NO: 1844 - RNA, 20 nt, synthetic construct
  source 1..20: mol_type = other RNA
atgtcaatatataaacctcc

SEQ ID NO: 1845 - RNA, 20 nt, synthetic construct
  source 1..20: mol_type = other RNA
ttttaccagctgccaaatat

SEQ ID NO: 1846 - RNA, 20 nt, synthetic construct
  source 1..20: mol_type = other RNA
tatggtgggatatttggcag

SEQ ID NO: 1847 - RNA, 20 nt, synthetic construct
  source 1..20: mol_type = other RNA
tcaatggagggacagatttt

SEQ ID NO: 1848 - RNA, 20 nt, synthetic construct
  source 1..20: mol_type = other RNA
gcaatccaaacattcatcaa

SEQ ID NO: 1849 - RNA, 20 nt, synthetic construct
  source 1..20: mol_type = other RNA
aggggttcagcaatccaaac

SEQ ID NO: 1850 - RNA, 20 nt, synthetic construct
  source 1..20: mol_type = other RNA
tccaggggttcagcaatcca

SEQ ID NO: 1851 - RNA, 20 nt, synthetic construct
  source 1..20: mol_type = other RNA
ataagagcaaacagaagtgt

SEQ ID NO: 1852 - RNA, 20 nt, synthetic construct
  source 1..20: mol_type = other RNA
gtttgctcttattgaatttc

SEQ ID NO: 1853 - RNA, 20 nt, synthetic construct
  source 1..20: mol_type = other RNA
cttagctctccccgctccac

SEQ ID NO: 1854 - RNA, 20 nt, synthetic construct
  source 1..20: mol_type = other RNA
ggctgcgctgcctcctgcct

SEQ ID NO: 1855 - RNA, 20 nt, synthetic construct
  source 1..20: mol_type = other RNA
caccccaccacatgtctggg

SEQ ID NO: 1856 - RNA, 20 nt, synthetic construct
  source 1..20: mol_type = other RNA
tataccctgttcagtcttta

SEQ ID NO: 1857 - RNA, 20 nt, synthetic construct
  source 1..20: mol_type = other RNA
gtctttactgagtcagaagc

SEQ ID NO: 1858 - RNA, 20 nt, synthetic construct
  source 1..20: mol_type = other RNA
gactcagtaaagactgaaca

SEQ ID NO: 1859 - RNA, 20 nt, synthetic construct
  source 1..20: mol_type = other RNA
tacggaaaagcgtgctgctg

SEQ ID NO: 1860 - RNA, 20 nt, synthetic construct
  source 1..20: mol_type = other RNA
gtaagaagctctgctgtaaa

SEQ ID NO: 1861 - RNA, 20 nt, synthetic construct
  source 1..20: mol_type = other RNA
aggatgaggctggagctggc

SEQ ID NO: 1862 - RNA, 20 nt, synthetic construct
  source 1..20: mol_type = other RNA
atatcattagtacctctttg

SEQ ID NO: 1863 - RNA, 20 nt, synthetic construct
  source 1..20: mol_type = other RNA
ttaggataaattcctaagaa

SEQ ID NO: 1864 - RNA, 20 nt, synthetic construct
  source 1..20: mol_type = other RNA
taagaaatcaaatagctagg

SEQ ID NO: 1865 - RNA, 20 nt, synthetic construct
  source 1..20: mol_type = other RNA
taggaatttatcctaaggaa

SEQ ID NO: 1866 - RNA, 20 nt, synthetic construct
  source 1..20: mol_type = other RNA
cagtttgctactgactagag

SEQ ID NO: 1867 - RNA, 20 nt, synthetic construct
  source 1..20: mol_type = other RNA
ggctgtttttgtacctttaa

SEQ ID NO: 1868 - RNA, 20 nt, synthetic construct
  source 1..20: mol_type = other RNA
aatcagggagaaaaaatgag

SEQ ID NO: 1869 - RNA, 20 nt, synthetic construct
  source 1..20: mol_type = other RNA
ccctgattagaaatgacgtc

SEQ ID NO: 1870 - RNA, 20 nt, synthetic construct
  source 1..20: mol_type = other RNA
gtaactcattttttctccct

SEQ ID NO: 1871 - RNA, 20 nt, synthetic construct
  source 1..20: mol_type = other RNA
aataccgtttattccgtaac

SEQ ID NO: 1872 - RNA, 20 nt, synthetic construct
  source 1..20: mol_type = other RNA
ggagaaaaataacctcactc

SEQ ID NO: 1873 - RNA, 20 nt, synthetic construct
  source 1..20: mol_type = other RNA
ccagaaggctagcctattgt

SEQ ID NO: 1874 - RNA, 20 nt, synthetic construct
  source 1..20: mol_type = other RNA
actgggatttacttttgtat

SEQ ID NO: 1875 - RNA, 20 nt, synthetic construct
  source 1..20: mol_type = other RNA
aagcacagtacaaaatcaag

SEQ ID NO: 1876 - RNA, 20 nt, synthetic construct
  source 1..20: mol_type = other RNA
tgattttgtactgtgcttag

SEQ ID NO: 1877 - RNA, 20 nt, synthetic construct
  source 1..20: mol_type = other RNA
tgacttcttgattttgtact

SEQ ID NO: 1878 - RNA, 20 nt, synthetic construct
  source 1..20: mol_type = other RNA
tggagtcaaacttatcagcc

SEQ ID NO: 1879 - RNA, 20 nt, synthetic construct
  source 1..20: mol_type = other RNA
atggaaaaaaatacaataaa

SEQ ID NO: 1880 - RNA, 20 nt, synthetic construct
  source 1..20: mol_type = other RNA
atagaaaattttaattttca

SEQ ID NO: 1881 - RNA, 20 nt, synthetic construct
  source 1..20: mol_type = other RNA
agtttgttgattgatttttg

SEQ ID NO: 1882 - RNA, 20 nt, synthetic construct
  source 1..20: mol_type = other RNA
ttttggctgtggagcttttg

SEQ ID NO: 1883 - RNA, 20 nt, synthetic construct
  source 1..20: mol_type = other RNA
ttttttcattttggctgtgg

SEQ ID NO: 1884 - RNA, 20 nt, synthetic construct
  source 1..20: mol_type = other RNA
aagacaaacaaatgtagata

SEQ ID NO: 1885 - RNA, 20 nt, synthetic construct
  source 1..20: mol_type = other RNA
ttaagttaaacaattatcta

SEQ ID NO: 1886 - RNA, 20 nt, synthetic construct
  source 1..20: mol_type = other RNA
caaatataccctttctcctc

SEQ ID NO: 1887 - RNA, 20 nt, synthetic construct
  source 1..20: mol_type = other RNA
cctccttctgggcacttggt

SEQ ID NO: 1888 - RNA, 20 nt, synthetic construct
  source 1..20: mol_type = other RNA
gggcacttggtgtgattgca

SEQ ID NO: 1889 - RNA, 20 nt, synthetic construct
  source 1..20: mol_type = other RNA
tacatttgaccttaggtgtg

SEQ ID NO: 1890 - RNA, 20 nt, synthetic construct
  source 1..20: mol_type = other RNA
cctaagcgagacacatgacc

SEQ ID NO: 1891 - RNA, 20 nt, synthetic construct
  source 1..20: mol_type = other RNA
ttctcctaagcgagacacat

SEQ ID NO: 1892 - RNA, 20 nt, synthetic construct
  source 1..20: mol_type = other RNA
catttccttctcctaagcga

SEQ ID NO: 1893 - RNA, 20 nt, synthetic construct
  source 1..20: mol_type = other RNA
gttcacatttccttctccta

SEQ ID NO: 1894 - RNA, 20 nt, synthetic construct
  source 1..20: mol_type = other RNA
acacaaaagtgacccacaac

SEQ ID NO: 1895 - RNA, 20 nt, synthetic construct
  source 1..20: mol_type = other RNA
gtcagcctcagtgttcagca

SEQ ID NO: 1896 - RNA, 20 nt, synthetic construct
  source 1..20: mol_type = other RNA
gcaatgttctgaatgatggt

SEQ ID NO: 1897 - RNA, 20 nt, synthetic construct
  source 1..20: mol_type = other RNA
gaatgatggttgctttatca

SEQ ID NO: 1898 - RNA, 20 nt, synthetic construct
  source 1..20: mol_type = other RNA
gaacattgctgaacactgag

SEQ ID NO: 1899 - RNA, 20 nt, synthetic construct
  source 1..20: mol_type = other RNA
ggggtgagggtaatgaagta

SEQ ID NO: 1900 - RNA, 20 nt, synthetic construct
  source 1..20: mol_type = other RNA
ttaccctcaccccagaacca

SEQ ID NO: 1901 - RNA, 20 nt, synthetic construct
  source 1..20: mol_type = other RNA
ctacttcattaccctcaccc

SEQ ID NO: 1902 - RNA, 20 nt, synthetic construct
  source 1..20: mol_type = other RNA
gtctcacctcacatgtccat

SEQ ID NO: 1903 - RNA, 20 nt, synthetic construct
  source 1..20: mol_type = other RNA
agcccctgagatttggggcg

SEQ ID NO: 1904 - RNA, 20 nt, synthetic construct
  source 1..20: mol_type = other RNA
agcacatgcacgccccaaat

SEQ ID NO: 1905 - RNA, 20 nt, synthetic construct
  source 1..20: mol_type = other RNA
gcttccagcacatgcacgcc

SEQ ID NO: 1906 - RNA, 20 nt, synthetic construct
  source 1..20: mol_type = other RNA
gatggattcctccagcactg

SEQ ID NO: 1907 - RNA, 20 nt, synthetic construct
  source 1..20: mol_type = other RNA
tccagcactgctcgtgggaa

SEQ ID NO: 1908 - RNA, 20 nt, synthetic construct
  source 1..20: mol_type = other RNA
cacgagcagtgctggaggaa

SEQ ID NO: 1909 - RNA, 20 nt, synthetic construct
  source 1..20: mol_type = other RNA
tgtgccctttatctcgaaat

SEQ ID NO: 1910 - RNA, 20 nt, synthetic construct
  source 1..20: mol_type = other RNA
agataaagggcacatgaatg

SEQ ID NO: 1911 - RNA, 20 nt, synthetic construct
  source 1..20: mol_type = other RNA
acttccaggaatttatgaaa

SEQ ID NO: 1912 - RNA, 20 nt, synthetic construct
  source 1..20: mol_type = other RNA
aggaatttatgaaacagata

SEQ ID NO: 1913 - RNA, 20 nt, synthetic construct
  source 1..20: mol_type = other RNA
tggaagtggaatttcgagat

SEQ ID NO: 1914 - RNA, 20 nt, synthetic construct
  source 1..20: mol_type = other RNA
taaattcctggaagtggaat

SEQ ID NO: 1915 - RNA, 20 nt, synthetic construct
  source 1..20: mol_type = other RNA
gtcttttgctattgcaatcc

SEQ ID NO: 1916 - RNA, 20 nt, synthetic construct
  source 1..20: mol_type = other RNA
gttggttgtttctgtctttt

SEQ ID NO: 1917 - RNA, 20 nt, synthetic construct
  source 1..20: mol_type = other RNA
tattggttggtgtttccgtt

SEQ ID NO: 1918 - RNA, 20 nt, synthetic construct
  source 1..20: mol_type = other RNA
caatgtctttagccaatttc

SEQ ID NO: 1919 - RNA, 20 nt, synthetic construct
  source 1..20: mol_type = other RNA
atgtatgtttcacaatgtct

SEQ ID NO: 1920 - RNA, 20 nt, synthetic construct
  source 1..20: mol_type = other RNA
ttctatgtatgtttcacaat

SEQ ID NO: 1921 - RNA, 20 nt, synthetic construct
  source 1..20: mol_type = other RNA
ggttgcagattatttcattc

SEQ ID NO: 1922 - RNA, 20 nt, synthetic construct
  source 1..20: mol_type = other RNA
gagattagggctaggttaag

SEQ ID NO: 1923 - RNA, 20 nt, synthetic construct
  source 1..20: mol_type = other RNA
gagatagtctacttttataa

SEQ ID NO: 1924 - RNA, 20 nt, synthetic construct
  source 1..20: mol_type = other RNA
tggggctgttataacaagtt

SEQ ID NO: 1925 - RNA, 20 nt, synthetic construct
  source 1..20: mol_type = other RNA
acaaatttgctggcttcaaa

SEQ ID NO: 1926 - RNA, 20 nt, synthetic construct
  source 1..20: mol_type = other RNA
aataacaaaaacgtattctc

SEQ ID NO: 1927 - RNA, 20 nt, synthetic construct
  source 1..20: mol_type = other RNA
cttgcagttatggaagccag

SEQ ID NO: 1928 - RNA, 20 nt, synthetic construct
  source 1..20: mol_type = other RNA
ataactgcaagagaatacgt

SEQ ID NO: 1929 - RNA, 20 nt, synthetic construct
  source 1..20: mol_type = other RNA
ggcttccataactgcaagag

SEQ ID NO: 1930 - RNA, 20 nt, synthetic construct
  source 1..20: mol_type = other RNA
atacttctggcttccataac

SEQ ID NO: 1931 - RNA, 20 nt, synthetic construct
  source 1..20: mol_type = other RNA
ttccatacttctggcttcca

SEQ ID NO: 1932 - RNA, 20 nt, synthetic construct
  source 1..20: mol_type = other RNA
tcccctagagctttgggaga

SEQ ID NO: 1933 - RNA, 20 nt, synthetic construct
  source 1..20: mol_type = other RNA
ttgcttcttccagctccttt

SEQ ID NO: 1934 - RNA, 20 nt, synthetic construct
  source 1..20: mol_type = other RNA
tccagctcctttgggggctc

SEQ ID NO: 1935 - RNA, 20 nt, synthetic construct
  source 1..20: mol_type = other RNA
agctcctttgggggctcctg

SEQ ID NO: 1936 - RNA, 20 nt, synthetic construct
  source 1..20: mol_type = other RNA
ttggcttatgtcggcacagc

SEQ ID NO: 1937 - RNA, 20 nt, synthetic construct
  source 1..20: mol_type = other RNA
gtgtctcaagtatctctccc

SEQ ID NO: 1938 - RNA, 20 nt, synthetic construct
  source 1..20: mol_type = other RNA
cttctgatatcagtcattgg

SEQ ID NO: 1939 - RNA, 20 nt, synthetic construct
  source 1..20: mol_type = other RNA
gatatcagtcattggattta

SEQ ID NO: 1940 - RNA, 20 nt, synthetic construct
  source 1..20: mol_type = other RNA
aaataaggtcacattcaaaa

SEQ ID NO: 1941 - RNA, 20 nt, synthetic construct
  source 1..20: mol_type = other RNA
aaagtaccaggggttagtct

SEQ ID NO: 1942 - RNA, 20 nt, synthetic construct
  source 1..20: mol_type = other RNA
acccactaccgtgggtaaca

SEQ ID NO: 1943 - RNA, 20 nt, synthetic construct
  source 1..20: mol_type = other RNA
ctcagaaggtggtggttcag

SEQ ID NO: 1944 - RNA, 20 nt, synthetic construct
  source 1..20: mol_type = other RNA
gagggaaaaccactgttacc

SEQ ID NO: 1945 - RNA, 20 nt, synthetic construct
  source 1..20: mol_type = other RNA
ggagtgggaggaagatgaac

SEQ ID NO: 1946 - RNA, 20 nt, synthetic construct
  source 1..20: mol_type = other RNA
tcccactcctgaaccaccac

SEQ ID NO: 1947 - RNA, 20 nt, synthetic construct
  source 1..20: mol_type = other RNA
tcttcctcccactcctgaac

SEQ ID NO: 1948 - RNA, 20 nt, synthetic construct
  source 1..20: mol_type = other RNA
ctgtatatcctttcaaacta

SEQ ID NO: 1949 - RNA, 20 nt, synthetic construct
  source 1..20: mol_type = other RNA
aactattcacgttttaaaaa

SEQ ID NO: 1950 - RNA, 20 nt, synthetic construct
  source 1..20: mol_type = other RNA
cgttttaaaaaaaacatttt

SEQ ID NO: 1951 - RNA, 20 nt, synthetic construct
  source 1..20: mol_type = other RNA
tgtaaatttaaaaaaattga

SEQ ID NO: 1952 - RNA, 20 nt, synthetic construct
  source 1..20: mol_type = other RNA
atttttttaaatttacatga

SEQ ID NO: 1953 - RNA, 20 nt, synthetic construct
  source 1..20: mol_type = other RNA
cacaaaaagatgccccctcc

SEQ ID NO: 1954 - RNA, 20 nt, synthetic construct
  source 1..20: mol_type = other RNA
aaatgttgaaatgtacactc

SEQ ID NO: 1955 - RNA, 20 nt, synthetic construct
  source 1..20: mol_type = other RNA
acattttgaacgggcatact

SEQ ID NO: 1956 - RNA, 20 nt, synthetic construct
  source 1..20: mol_type = other RNA
gaggttggagaaggtagcca

SEQ ID NO: 1957 - RNA, 20 nt, synthetic construct
  source 1..20: mol_type = other RNA
ccaacctcagaaacttggag

SEQ ID NO: 1958 - RNA, 20 nt, synthetic construct
  source 1..20: mol_type = other RNA
atctactcattcagtctatg

SEQ ID NO: 1959 - RNA, 20 nt, synthetic construct
  source 1..20: mol_type = other RNA
gtctatgaggggaaggcaat

SEQ ID NO: 1960 - RNA, 20 nt, synthetic construct
  source 1..20: mol_type = other RNA
cctcatagactgaatgagta

SEQ ID NO: 1961 - RNA, 20 nt, synthetic construct
  source 1..20: mol_type = other RNA
agccattgccttcccctcat

SEQ ID NO: 1962 - RNA, 20 nt, synthetic construct
  source 1..20: mol_type = other RNA
tccctctaaaaatgccactt

SEQ ID NO: 1963 - RNA, 20 nt, synthetic construct
  source 1..20: mol_type = other RNA
ccccacaagcatcctcaagg

SEQ ID NO: 1964 - RNA, 20 nt, synthetic construct
  source 1..20: mol_type = other RNA
cttcaccccacaagcatcct

SEQ ID NO: 1965 - RNA, 20 nt, synthetic construct
  source 1..20: mol_type = other RNA
ttcccttcaccccacaagca

SEQ ID NO: 1966 - RNA, 20 nt, synthetic construct
  source 1..20: mol_type = other RNA
tgagttattctttcccttca

SEQ ID NO: 1967 - RNA, 20 nt, synthetic construct
  source 1..20: mol_type = other RNA
gggcagaggggaccatcctc

SEQ ID NO: 1968 - RNA, 20 nt, synthetic construct
  source 1..20: mol_type = other RNA
tccttcagggcagaggggac

SEQ ID NO: 1969 - RNA, 20 nt, synthetic construct
  source 1..20: mol_type = other RNA
cctcctgccttcctccttca

SEQ ID NO: 1970 - RNA, 20 nt, synthetic construct
  source 1..20: mol_type = other RNA
gggtcaacacccatcctttt

SEQ ID NO: 1971 - RNA, 20 nt, synthetic construct
  source 1..20: mol_type = other RNA
ggggcctcccctccaccaca

SEQ ID NO: 1972 - RNA, 20 nt, synthetic construct
  source 1..20: mol_type = other RNA
gacttaccctgattgctggt

SEQ ID NO: 1973 - RNA, 20 nt, synthetic construct
  source 1..20: mol_type = other RNA
cccacaccctggccagcaaa

SEQ ID NO: 1974 - RNA, 20 nt, synthetic construct
  source 1..20: mol_type = other RNA
caaatgggttcccccacacc

SEQ ID NO: 1975 - RNA, 20 nt, synthetic construct
  source 1..20: mol_type = other RNA
ccctcttctcaaatgggttc

SEQ ID NO: 1976 - RNA, 20 nt, synthetic construct
  source 1..20: mol_type = other RNA
tttgggcaacttatgggagg

SEQ ID NO: 1977 - RNA, 20 nt, synthetic construct
  source 1..20: mol_type = other RNA
tccctcaccaattacccctc

SEQ ID NO: 1978 - RNA, 20 nt, synthetic construct
  source 1..20: mol_type = other RNA
catcccatatcctccactgc

SEQ ID NO: 1979 - RNA, 20 nt, synthetic construct
  source 1..20: mol_type = other RNA
atctgtcgcagagcccaggg

SEQ ID NO: 1980 - RNA, 20 nt, synthetic construct
  source 1..20: mol_type = other RNA
ttcctcccccacctccctca

SEQ ID NO: 1981 - RNA, 20 nt, synthetic construct
  source 1..20: mol_type = other RNA
tcccccacctccctcagaac

SEQ ID NO: 1982 - RNA, 20 nt, synthetic construct
  source 1..20: mol_type = other RNA
gagggaggtgggggaggaag

SEQ ID NO: 1983 - RNA, 20 nt, synthetic construct
  source 1..20: mol_type = other RNA
tgggcctggggacatccatg

SEQ ID NO: 1984 - RNA, 20 nt, synthetic construct
  source 1..20: mol_type = other RNA
tcattctctgggtgcacggt

SEQ ID NO: 1985 - RNA, 20 nt, synthetic construct
  source 1..20: mol_type = other RNA
ctgggtgcacggtaacgacc

SEQ ID NO: 1986 - RNA, 20 nt, synthetic construct
  source 1..20: mol_type = other RNA
ctgctgctcccctttgggac

SEQ ID NO: 1987 - RNA, 20 nt, synthetic construct
  source 1..20: mol_type = other RNA
tgctccaggggaggcctttg

SEQ ID NO: 1988 - RNA, 20 nt, synthetic construct
  source 1..20: mol_type = other RNA
tcatcaaaggcctcccctgg

SEQ ID NO: 1989 - RNA, 20 nt, synthetic construct
  source 1..20: mol_type = other RNA
aattacaggcaacaggaagg

SEQ ID NO: 1990 - RNA, 20 nt, synthetic construct
  source 1..20: mol_type = other RNA
tgttgcctgtaattggaatt

SEQ ID NO: 1991 - RNA, 20 nt, synthetic construct
  source 1..20: mol_type = other RNA
ccttcctgttgcctgtaatt

SEQ ID NO: 1992 - RNA, 20 nt, synthetic construct
  source 1..20: mol_type = other RNA
actttgtttgcaaagacctc

SEQ ID NO: 1993 - RNA, 20 nt, synthetic construct
  source 1..20: mol_type = other RNA
tgaacatggtgtgtaaaagg

SEQ ID NO: 1994 - RNA, 20 nt, synthetic construct
  source 1..20: mol_type = other RNA
agaaatcaactggacaagca

SEQ ID NO: 1995 - RNA, 20 nt, synthetic construct
  source 1..20: mol_type = other RNA
ttttacacaccatgttcaag

SEQ ID NO: 1996 - RNA, 20 nt, synthetic construct
  source 1..20: mol_type = other RNA
atttgcaaagattcctttta

SEQ ID NO: 1997 - RNA, 20 nt, synthetic construct
  source 1..20: mol_type = other RNA
ggaaagctgagcttgtgcct

SEQ ID NO: 1998 - RNA, 20 nt, synthetic construct
  source 1..20: mol_type = other RNA
agaagattcaatttgcaaag

SEQ ID NO: 1999 - RNA, 20 nt, synthetic construct
  source 1..20: mol_type = other RNA
atggtaggcacaagctcagc

SEQ ID NO: 2000 - RNA, 20 nt, synthetic construct
  source 1..20: mol_type = other RNA
gaatgtacctatatgacgtc

SEQ ID NO: 2001 - RNA, 20 nt, synthetic construct
  source 1..20: mol_type = other RNA
gaattctatggtaggcacaa

SEQ ID NO: 2002 - RNA, 20 nt, synthetic construct
  source 1..20: mol_type = other RNA
ggttttaagtttgcaaagac

SEQ ID NO: 2003 - RNA, 20 nt, synthetic construct
  source 1..20: mol_type = other RNA
agggatttatactacaaaga

SEQ ID NO: 2004 - RNA, 20 nt, synthetic construct
  source 1..20: mol_type = other RNA
aggagcagctagttggtaag

SEQ ID NO: 2005 - RNA, 20 nt, synthetic construct
  source 1..20: mol_type = other RNA
aaacttagcctggaccccct

SEQ ID NO: 2006 - RNA, 20 nt, synthetic construct
  source 1..20: mol_type = other RNA
actggccttaacctggcagc

SEQ ID NO: 2007 - RNA, 20 nt, synthetic construct
  source 1..20: mol_type = other RNA
ttccactggccttaacctgg

SEQ ID NO: 2008 - RNA, 20 nt, synthetic construct
  source 1..20: mol_type = other RNA
gtgggcagcgaggagtccac

SEQ ID NO: 2009 - RNA, 20 nt, synthetic construct
  source 1..20: mol_type = other RNA
gaagtctcactggtcagcag

SEQ ID NO: 2010 - RNA, 20 nt, synthetic construct
  source 1..20: mol_type = other RNA
gaatcaatcctactgtggac

SEQ ID NO: 2011 - RNA, 20 nt, synthetic construct
  source 1..20: mol_type = other RNA
tgggtccaccttgtctcctg

SEQ ID NO: 2012 - RNA, 20 nt, synthetic construct
  source 1..20: mol_type = other RNA
gtgtttcctgggtccacctt

SEQ ID NO: 2013 - RNA, 20 nt, synthetic construct
  source 1..20: mol_type = other RNA
gccgggcccaccttttcagt

SEQ ID NO: 2014 - RNA, 20 nt, synthetic construct
  source 1..20: mol_type = other RNA
gcctcgccctccccaaacag

SEQ ID NO: 2015 - RNA, 20 nt, synthetic construct
  source 1..20: mol_type = other RNA
gttaatgtttaatcagatag

SEQ ID NO: 2016 - RNA, 20 nt, synthetic construct
  source 1..20: mol_type = other RNA
gcgcgccccttcacgcgccc

SEQ ID NO: 2017 - RNA, 20 nt, synthetic construct
  source 1..20: mol_type = other RNA
tctcgggcctcagtttcccc

SEQ ID NO: 2018 - RNA, 20 nt, synthetic construct
  source 1..20: mol_type = other RNA
ccccatgtaagagaggaagt

SEQ ID NO: 2019 - RNA, 20 nt, synthetic construct
  source 1..20: mol_type = other RNA
tctcttacatggggggaaac

SEQ ID NO: 2020 - RNA, 20 nt, synthetic construct
  source 1..20: mol_type = other RNA
cagtttctgcctcgccgcgg

SEQ ID NO: 2021 - RNA, 20 nt, synthetic construct
  source 1..20: mol_type = other RNA
gcctcgccgcggcacaggtg

SEQ ID NO: 2022 - RNA, 20 nt, synthetic construct
  source 1..20: mol_type = other RNA
cccacctgtgccgcggcgag

SEQ ID NO: 2023 - RNA, 20 nt, synthetic construct
  source 1..20: mol_type = other RNA
ctccttcacccacctgtgcc

SEQ ID NO: 2024 - RNA, 20 nt, synthetic construct
  source 1..20: mol_type = other RNA
aggcattcactccttcaccc

SEQ ID NO: 2025 - RNA, 20 nt, synthetic construct
  source 1..20: mol_type = other RNA
ctgtgcctggtgcagttccc

SEQ ID NO: 2026 - RNA, 20 nt, synthetic construct
  source 1..20: mol_type = other RNA
caccccgcccctgtctcggg

SEQ ID NO: 2027 - RNA, 20 nt, synthetic construct
  source 1..20: mol_type = other RNA
ttatgacacagaactcatgc

SEQ ID NO: 2028 - RNA, 20 nt, synthetic construct
  source 1..20: mol_type = other RNA
gtgtcataaagaaattgcct

SEQ ID NO: 2029 - RNA, 20 nt, synthetic construct
  source 1..20: mol_type = other RNA
atctgtttcagccgaagaaa

SEQ ID NO: 2030 - RNA, 20 nt, synthetic construct
  source 1..20: mol_type = other RNA
gccgaagaaaagaaccagct

SEQ ID NO: 2031 - RNA, 20 nt, synthetic construct
  source 1..20: mol_type = other RNA
gctgaaacagatggaatact

SEQ ID NO: 2032 - RNA, 20 nt, synthetic construct
  source 1..20: mol_type = other RNA
tcggctgaaacagatggaat

SEQ ID NO: 2033 - RNA, 20 nt, synthetic construct
  source 1..20: mol_type = other RNA
tttcttcggctgaaacagat

SEQ ID NO: 2034 - RNA, 20 nt, synthetic construct
  source 1..20: mol_type = other RNA
gctggttcttttcttcggct

SEQ ID NO: 2035 - RNA, 20 nt, synthetic construct
  source 1..20: mol_type = other RNA
cccctgccccttcagctggt

SEQ ID NO: 2036 - RNA, 20 nt, synthetic construct
  source 1..20: mol_type = other RNA
cgaggcccattggcgtcctt

SEQ ID NO: 2037 - RNA, 20 nt, synthetic construct
  source 1..20: mol_type = other RNA
ctgcctgagtcctaaaggac

SEQ ID NO: 2038 - RNA, 20 nt, synthetic construct
  source 1..20: mol_type = other RNA
ggccctcaggctgtgggaag

SEQ ID NO: 2039 - RNA, 20 nt, synthetic construct
  source 1..20: mol_type = other RNA
cacagcctgagggccagaag

SEQ ID NO: 2040 - RNA, 20 nt, synthetic construct
  source 1..20: mol_type = other RNA
tcccggggcgagaccactag

SEQ ID NO: 2041 - RNA, 20 nt, synthetic construct
  source 1..20: mol_type = other RNA
cggggcgagaccactagctt

SEQ ID NO: 2042 - RNA, 20 nt, synthetic construct
  source 1..20: mol_type = other RNA
aagtattaccagcccaggac

SEQ ID NO: 2043 - RNA, 20 nt, synthetic construct
  source 1..20: mol_type = other RNA
gtgtcccccagcttggagtc

SEQ ID NO: 2044 - RNA, 20 nt, synthetic construct
  source 1..20: mol_type = other RNA
accccacatctgactccaag

SEQ ID NO: 2045 - RNA, 20 nt, synthetic construct
  source 1..20: mol_type = other RNA
tctcactagctgtggtgctt

SEQ ID NO: 2046 - RNA, 20 nt, synthetic construct
  source 1..20: mol_type = other RNA
tctccccatctgctgccact

SEQ ID NO: 2047 - RNA, 20 nt, synthetic construct
  source 1..20: mol_type = other RNA
cttcatctccccatctgctg

SEQ ID NO: 2048 - RNA, 20 nt, synthetic construct
  source 1..20: mol_type = other RNA
gttgaccatgagtgaactta

SEQ ID NO: 2049 - RNA, 20 nt, synthetic construct
  source 1..20: mol_type = other RNA
ctcatggtcaacagaacttt

SEQ ID NO: 2050 - RNA, 20 nt, synthetic construct
  source 1..20: mol_type = other RNA
cctctgccccaggagctgtg

SEQ ID NO: 2051 - RNA, 20 nt, synthetic construct
  source 1..20: mol_type = other RNA
gccactcacagctgcctgcc

SEQ ID NO: 2052 - RNA, 20 nt, synthetic construct
  source 1..20: mol_type = other RNA
gtctgagtgtgctgggtggc

SEQ ID NO: 2053 - RNA, 20 nt, synthetic construct
  source 1..20: mol_type = other RNA
ttgttccctgagcctttgac

SEQ ID NO: 2054 - RNA, 20 nt, synthetic construct
  source 1..20: mol_type = other RNA
ctgagcctttgactttctcg

SEQ ID NO: 2055 - RNA, 20 nt, synthetic construct
  source 1..20: mol_type = other RNA
cgagggatgttgtggggttg

SEQ ID NO: 2056 - RNA, 20 nt, synthetic construct
  source 1..20: mol_type = other RNA
tatcctggccacaaccccac

SEQ ID NO: 2057 - RNA, 20 nt, synthetic construct
  source 1..20: mol_type = other RNA
agttaccactgctccaaaac

SEQ ID NO: 2058 - RNA, 20 nt, synthetic construct
  source 1..20: mol_type = other RNA
ggaaatagtgagtaccccat

SEQ ID NO: 2059 - RNA, 20 nt, synthetic construct
  source 1..20: mol_type = other RNA
agaacagttgttttggagca

SEQ ID NO: 2060 - RNA, 20 nt, synthetic construct
  source 1..20: mol_type = other RNA
ggtggtcatacagcctctgc

SEQ ID NO: 2061 - RNA, 20 nt, synthetic construct
  source 1..20: mol_type = other RNA
tctctggtggaagtttggaa

SEQ ID NO: 2062 - RNA, 20 nt, synthetic construct
  source 1..20: mol_type = other RNA
ctggtggaagtttggaacag

SEQ ID NO: 2063 - RNA, 20 nt, synthetic construct
  source 1..20: mol_type = other RNA
accagagaagaaacatcctc

SEQ ID NO: 2064 - RNA, 20 nt, synthetic construct
  source 1..20: mol_type = other RNA
aaacttccaccagagaagaa

SEQ ID NO: 2065 - RNA, 20 nt, synthetic construct
  source 1..20: mol_type = other RNA
tttattcattcattcaatgg

SEQ ID NO: 2066 - RNA, 20 nt, synthetic construct
  source 1..20: mol_type = other RNA
ttcattcaatggttattttg

SEQ ID NO: 2067 - RNA, 20 nt, synthetic construct
  source 1..20: mol_type = other RNA
ttcaatggttattttgtggg

SEQ ID NO: 2068 - RNA, 20 nt, synthetic construct
  source 1..20: mol_type = other RNA
atggttattttgtgggaatc

SEQ ID NO: 2069 - RNA, 20 nt, synthetic construct
  source 1..20: mol_type = other RNA
cacaaaataaccattgaatg

SEQ ID NO: 2070 - RNA, 20 nt, synthetic construct
  source 1..20: mol_type = other RNA
attcccacaaaataaccatt

SEQ ID NO: 2071 - RNA, 20 nt, synthetic construct
  source 1..20: mol_type = other RNA
aaattcgattcccacaaaat

SEQ ID NO: 2072 - RNA, 20 nt, synthetic construct
  source 1..20: mol_type = other RNA
ttctaaattcgattcccaca

SEQ ID NO: 2073 - RNA, 20 nt, synthetic construct
  source 1..20: mol_type = other RNA
gcttgccaaaaaatattttc

SEQ ID NO: 2074 - RNA, 20 nt, synthetic construct
  source 1..20: mol_type = other RNA
tttagtcatgagaaactgag

SEQ ID NO: 2075 - RNA, 20 nt, synthetic construct
  source 1..20: mol_type = other RNA
catgactaaaagaaaaggat

SEQ ID NO: 2076 - RNA, 20 nt, synthetic construct
  source 1..20: mol_type = other RNA
aatgcacctggggtgacctc

SEQ ID NO: 2077 - RNA, 20 nt, synthetic construct
  source 1..20: mol_type = other RNA
agaactgacactccactgca

SEQ ID NO: 2078 - RNA, 20 nt, synthetic construct
  source 1..20: mol_type = other RNA
ggaaacccagttctaatgca

SEQ ID NO: 2079 - RNA, 20 nt, synthetic construct
  source 1..20: mol_type = other RNA
ttcaatttttatttagcgga

SEQ ID NO: 2080 - RNA, 20 nt, synthetic construct
  source 1..20: mol_type = other RNA
atttttatttagcggaaggc

SEQ ID NO: 2081 - RNA, 20 nt, synthetic construct
  source 1..20: mol_type = other RNA
gctaaataaaaattgaatga

SEQ ID NO: 2082 - RNA, 20 nt, synthetic construct
  source 1..20: mol_type = other RNA
gatgggtctttgaagcatta

SEQ ID NO: 2083 - RNA, 20 nt, synthetic construct
  source 1..20: mol_type = other RNA
aagacccatctgaaaatgcc

SEQ ID NO: 2084 - RNA, 20 nt, synthetic construct
  source 1..20: mol_type = other RNA
gcgatgatggtgtcatgaga

SEQ ID NO: 2085 - RNA, 20 nt, synthetic construct
  source 1..20: mol_type = other RNA
catgacaccatcatcgctga

SEQ ID NO: 2086 - RNA, 20 nt, synthetic construct
  source 1..20: mol_type = other RNA
aggattaggaggtaccatga

SEQ ID NO: 2087 - RNA, 20 nt, synthetic construct
  source 1..20: mol_type = other RNA
tggtacctcctaatcctaga

SEQ ID NO: 2088 - RNA, 20 nt, synthetic construct
  source 1..20: mol_type = other RNA
cagctctgtatctttgttca

SEQ ID NO: 2089 - RNA, 20 nt, synthetic construct
  source 1..20: mol_type = other RNA
acctctggttttcccagctc

SEQ ID NO: 2090 - RNA, 20 nt, synthetic construct
  source 1..20: mol_type = other RNA
ttttcttttttttttgagat

SEQ ID NO: 2091 - RNA, 20 nt, synthetic construct
  source 1..20: mol_type = other RNA
tttttttttgagatggagtt

SEQ ID NO: 2092 - RNA, 20 nt, synthetic construct
  source 1..20: mol_type = other RNA
ctcttgttgcccaggctgga

SEQ ID NO: 2093 - RNA, 20 nt, synthetic construct
  source 1..20: mol_type = other RNA
agtggttctcctgcctcagc

SEQ ID NO: 2094 - RNA, 20 nt, synthetic construct
  source 1..20: mol_type = other RNA
cctgcctcagcctcccaaga

SEQ ID NO: 2095 - RNA, 20 nt, synthetic construct
  source 1..20: mol_type = other RNA
tgggaggctgaggcaggaga

SEQ ID NO: 2096 - RNA, 20 nt, synthetic construct
  source 1..20: mol_type = other RNA
ctactaaaaatacaaaaatt

SEQ ID NO: 2097 - RNA, 20 nt, synthetic construct
  source 1..20: mol_type = other RNA
ccacgttggccaggctagtc

SEQ ID NO: 2098 - RNA, 20 nt, synthetic construct
  source 1..20: mol_type = other RNA
agcactttgggaggctgagg

SEQ ID NO: 2099 - RNA, 20 nt, synthetic construct
  source 1..20: mol_type = other RNA
ttatccaccgtctgaaatgt

SEQ ID NO: 2100 - RNA, 20 nt, synthetic construct
  source 1..20: mol_type = other RNA
gacggtggataaagaactgt

SEQ ID NO: 2101 - RNA, 20 nt, synthetic construct
  source 1..20: mol_type = other RNA
taacattttacatttcagac

SEQ ID NO: 2102 - RNA, 20 nt, synthetic construct
  source 1..20: mol_type = other RNA
cgtcaggtgctaccatcaaa

SEQ ID NO: 2103 - RNA, 20 nt, synthetic construct
  source 1..20: mol_type = other RNA
cacaactaaattaaaaataa

SEQ ID NO: 2104 - RNA, 20 nt, synthetic construct
  source 1..20: mol_type = other RNA
tatattttgctgcatagatt

SEQ ID NO: 2105 - RNA, 20 nt, synthetic construct
  source 1..20: mol_type = other RNA
tccaagcagactctgattgc

SEQ ID NO: 2106 - RNA, 20 nt, synthetic construct
  source 1..20: mol_type = other RNA
aagcagactctgattgccca

SEQ ID NO: 2107 - RNA, 20 nt, synthetic construct
  source 1..20: mol_type = other RNA
aaaatccaaacaagttctga

SEQ ID NO: 2108 - RNA, 20 nt, synthetic construct
  source 1..20: mol_type = other RNA
gaggttcaaaaccgttttgg

SEQ ID NO: 2109 - RNA, 20 nt, synthetic construct
  source 1..20: mol_type = other RNA
aaaccgttttggccctaagg

SEQ ID NO: 2110 - RNA, 20 nt, synthetic construct
  source 1..20: mol_type = other RNA
actctgactggagtccaaga

SEQ ID NO: 2111 - RNA, 20 nt, synthetic construct
  source 1..20: mol_type = other RNA
tgaggctgtggggagccagt

SEQ ID NO: 2112 - RNA, 20 nt, synthetic construct
  source 1..20: mol_type = other RNA
ctggctccccacagcctcat

SEQ ID NO: 2113 - RNA, 20 nt, synthetic construct
  source 1..20: mol_type = other RNA
taagcaggtatgtctgcctg

SEQ ID NO: 2114 - RNA, 20 nt, synthetic construct
  source 1..20: mol_type = other RNA
acatgagatttggaggggac

SEQ ID NO: 2115 - RNA, 20 nt, synthetic construct
  source 1..20: mol_type = other RNA
aacactgaggaccaaatttc

SEQ ID NO: 2116 - RNA, 20 nt, synthetic construct
  source 1..20: mol_type = other RNA
tcccccatgacccaaacacc

SEQ ID NO: 2117 - RNA, 20 nt, synthetic construct
  source 1..20: mol_type = other RNA
caggggttcctcccccatga

SEQ ID NO: 2118 - RNA, 20 nt, synthetic construct
  source 1..20: mol_type = other RNA
cccgctatgatttcccttga

SEQ ID NO: 2119 - RNA, 20 nt, synthetic construct
  source 1..20: mol_type = other RNA
cttgaaggctgattattaaa

SEQ ID NO: 2120 - RNA, 20 nt, synthetic construct
  source 1..20: mol_type = other RNA
agggaaatcatagcgggaga

SEQ ID NO: 2121 - RNA, 20 nt, synthetic construct
  source 1..20: mol_type = other RNA
ctcttgcttcttctcttgcc

SEQ ID NO: 2122 - RNA, 20 nt, synthetic construct
  source 1..20: mol_type = other RNA
tctcttgccatgtgattgat

SEQ ID NO: 2123 - RNA, 20 nt, synthetic construct
  source 1..20: mol_type = other RNA
cttgccatgtgattgatctc

SEQ ID NO: 2124 - RNA, 20 nt, synthetic construct
  source 1..20: mol_type = other RNA
ccttctgccatcagtgaaag

SEQ ID NO: 2125 - RNA, 20 nt, synthetic construct
  source 1..20: mol_type = other RNA
gccatcagtgaaagcagctt

SEQ ID NO: 2126 - RNA, 20 nt, synthetic construct
  source 1..20: mol_type = other RNA
ctgatggcagaaggtgaagg

SEQ ID NO: 2127 - RNA, 20 nt, synthetic construct
  source 1..20: mol_type = other RNA
ggtgagggccttaagctgct

SEQ ID NO: 2128 - RNA, 20 nt, synthetic construct
  source 1..20: mol_type = other RNA
tggagagcttgcagaatcat

SEQ ID NO: 2129 - RNA, 20 nt, synthetic construct
  source 1..20: mol_type = other RNA
gcaagctctccaggaagcat

SEQ ID NO: 2130 - RNA, 20 nt, synthetic construct
  source 1..20: mol_type = other RNA
gctcatgattctgcaagctc

SEQ ID NO: 2131 - RNA, 20 nt, synthetic construct
  source 1..20: mol_type = other RNA
ttgtaaattactcaccttca

SEQ ID NO: 2132 - RNA, 20 nt, synthetic construct
  source 1..20: mol_type = other RNA
ggtattcctttatatagcaa

SEQ ID NO: 2133 - RNA, 20 nt, synthetic construct
  source 1..20: mol_type = other RNA
tttatatagcaacacaaaag

SEQ ID NO: 2134 - RNA, 20 nt, synthetic construct
  source 1..20: mol_type = other RNA
ctctctttaagaagtgttgc

SEQ ID NO: 2135 - RNA, 20 nt, synthetic construct
  source 1..20: mol_type = other RNA
taaagagagagaaaagtcaa

SEQ ID NO: 2136 - RNA, 20 nt, synthetic construct
  source 1..20: mol_type = other RNA
gcctgcatttgtagagcatc

SEQ ID NO: 2137 - RNA, 20 nt, synthetic construct
  source 1..20: mol_type = other RNA
cagcaggcctatgtcatagg

SEQ ID NO: 2138 - RNA, 20 nt, synthetic construct
  source 1..20: mol_type = other RNA
agctccaatatttactggtt

SEQ ID NO: 2139 - RNA, 20 nt, synthetic construct
  source 1..20: mol_type = other RNA
ggtccacggtttcctggctc

SEQ ID NO: 2140 - RNA, 20 nt, synthetic construct
  source 1..20: mol_type = other RNA
tggctccaaagcccatgatt

SEQ ID NO: 2141 - RNA, 20 nt, synthetic construct
  source 1..20: mol_type = other RNA
ctcaatttattctgactggg

SEQ ID NO: 2142 - RNA, 20 nt, synthetic construct
  source 1..20: mol_type = other RNA
gactggggcatgggggaggg

SEQ ID NO: 2143 - RNA, 20 nt, synthetic construct
  source 1..20: mol_type = other RNA
tctgtacctgcacccagctc

SEQ ID NO: 2144 - RNA, 20 nt, synthetic construct
  source 1..20: mol_type = other RNA
catttttgcctgaatggcac

SEQ ID NO: 2145 - RNA, 20 nt, synthetic construct
  source 1..20: mol_type = other RNA
ggcaaaaatgggaactacgg

SEQ ID NO: 2146 - RNA, 20 nt, synthetic construct
  source 1..20: mol_type = other RNA
aatgtgccattcaggcaaaa

SEQ ID NO: 2147 - RNA, 20 nt, synthetic construct
  source 1..20: mol_type = other RNA
catggttatataacactttc

SEQ ID NO: 2148 - RNA, 20 nt, synthetic construct
  source 1..20: mol_type = other RNA
ttaatttgctttttggtccg

SEQ ID NO: 2149 - RNA, 20 nt, synthetic construct
  source 1..20: mol_type = other RNA
ttatcatctactatactctg

SEQ ID NO: 2150 - RNA, 20 nt, synthetic construct
  source 1..20: mol_type = other RNA
gattttcagcaatgggccta

SEQ ID NO: 2151 - RNA, 20 nt, synthetic construct
  source 1..20: mol_type = other RNA
gtatagaattccctttaagc

SEQ ID NO: 2152 - RNA, 20 nt, synthetic construct
  source 1..20: mol_type = other RNA
atacagaaagccagtagtta

SEQ ID NO: 2153 - RNA, 20 nt, synthetic construct
  source 1..20: mol_type = other RNA
ctttaagcctggccatgccc

SEQ ID NO: 2154 - RNA, 20 nt, synthetic construct
  source 1..20: mol_type = other RNA
tttgaaagacgaggagactg

SEQ ID NO: 2155 - RNA, 20 nt, synthetic construct
  source 1..20: mol_type = other RNA
aatgaagatagacgtaccac

SEQ ID NO: 2156 - RNA, 20 nt, synthetic construct
  source 1..20: mol_type = other RNA
gtctcctcgtctttcaaatg

SEQ ID NO: 2157 - RNA, 20 nt, synthetic construct
  source 1..20: mol_type = other RNA
gaggggaccacacagacagc

SEQ ID NO: 2158 - RNA, 20 nt, synthetic construct
  source 1..20: mol_type = other RNA
tgtgccaatgcatctgctgc

SEQ ID NO: 2159 - RNA, 20 nt, synthetic construct
  source 1..20: mol_type = other RNA
gtaggcagcagatgcattgg

SEQ ID NO: 2160 - RNA, 20 nt, synthetic construct
  source 1..20: mol_type = other RNA
gtggagcctgagtcatttta

SEQ ID NO: 2161 - RNA, 20 nt, synthetic construct
  source 1..20: mol_type = other RNA
tttgaagctgttgctatcca

SEQ ID NO: 2162 - RNA, 20 nt, synthetic construct
  source 1..20: mol_type = other RNA
aaggaattttggaccctaga

SEQ ID NO: 2163 - RNA, 20 nt, synthetic construct
  source 1..20: mol_type = other RNA
ctctggatagcaacagcttc

SEQ ID NO: 2164 - RNA, 20 nt, synthetic construct
  source 1..20: mol_type = other RNA
ttaggacagggtggccctcc

SEQ ID NO: 2165 - RNA, 20 nt, synthetic construct
  source 1..20: mol_type = other RNA
gtggaggggcagaaagggga

SEQ ID NO: 2166 - RNA, 20 nt, synthetic construct
  source 1..20: mol_type = other RNA
gcccctccaccgaagatgtg

SEQ ID NO: 2167 - RNA, 20 nt, synthetic construct
  source 1..20: mol_type = other RNA
cctcaccctggccctagtgc

SEQ ID NO: 2168 - RNA, 20 nt, synthetic construct
  source 1..20: mol_type = other RNA
aatcttaaaaaaacgttttt

SEQ ID NO: 2169 - RNA, 20 nt, synthetic construct
  source 1..20: mol_type = other RNA
gcaccaccttctagcccacc

SEQ ID NO: 2170 - RNA, 20 nt, synthetic construct
  source 1..20: mol_type = other RNA
agcccacctcgtttcctggc

SEQ ID NO: 2171 - RNA, 20 nt, synthetic construct
  source 1..20: mol_type = other RNA
tggcctctaacttgatgaga

SEQ ID NO: 2172 - RNA, 20 nt, synthetic construct
  source 1..20: mol_type = other RNA
cactgattctccacatggca

SEQ ID NO: 2173 - RNA, 20 nt, synthetic construct
  source 1..20: mol_type = other RNA
ccacatggcaggcggtgctt

SEQ ID NO: 2174 - RNA, 20 nt, synthetic construct
  source 1..20: mol_type = other RNA
tagcctcctgcagacagtga

SEQ ID NO: 2175 - RNA, 20 nt, synthetic construct
  source 1..20: mol_type = other RNA
gccacggtatgctgagctga

SEQ ID NO: 2176 - RNA, 20 nt, synthetic construct
  source 1..20: mol_type = other RNA
aaggcagggaccctgtcaat

SEQ ID NO: 2177 - RNA, 20 nt, synthetic construct
  source 1..20: mol_type = other RNA
atcagtctgctcaacacacg

SEQ ID NO: 2178 - RNA, 20 nt, synthetic construct
  source 1..20: mol_type = other RNA
cctctgcagcacacagtagg

SEQ ID NO: 2179 - RNA, 20 nt, synthetic construct
  source 1..20: mol_type = other RNA
cttgagcttacagttcagga

SEQ ID NO: 2180 - RNA, 20 nt, synthetic construct
  source 1..20: mol_type = other RNA
ggaggagagactgaccagtg

SEQ ID NO: 2181 - RNA, 20 nt, synthetic construct
  source 1..20: mol_type = other RNA
tctctccccaaggctgagca

SEQ ID NO: 2182 - RNA, 20 nt, synthetic construct
  source 1..20: mol_type = other RNA
tcgtctctccccaaggctga

SEQ ID NO: 2183 - RNA, 20 nt, synthetic construct
  source 1..20: mol_type = other RNA
gcttggcctactctcctctg

SEQ ID NO: 2184 - RNA, 20 nt, synthetic construct
  source 1..20: mol_type = other RNA
gtttgccttctgcttggcct

SEQ ID NO: 2185 - RNA, 20 nt, synthetic construct
  source 1..20: mol_type = other RNA
aactgggcatcataccagcc

SEQ ID NO: 2186 - RNA, 20 nt, synthetic construct
  source 1..20: mol_type = other RNA
agtcctgcccagccccttat

SEQ ID NO: 2187 - RNA, 20 nt, synthetic construct
  source 1..20: mol_type = other RNA
cctctctgagcctcattcct

SEQ ID NO: 2188 - RNA, 20 nt, synthetic construct
  source 1..20: mol_type = other RNA
tctatctgtaaaccagttat

SEQ ID NO: 2189 - RNA, 20 nt, synthetic construct
  source 1..20: mol_type = other RNA
aattattataactggtttac

SEQ ID NO: 2190 - RNA, 20 nt, synthetic construct
  source 1..20: mol_type = other RNA
tttaaggactaaatgaggtc

SEQ ID NO: 2191 - RNA, 20 nt, synthetic construct
  source 1..20: mol_type = other RNA
cgacctcatttagtccttaa

SEQ ID NO: 2192 - RNA, 20 nt, synthetic construct
  source 1..20: mol_type = other RNA
gcagatgctaggtacggaaa

SEQ ID NO: 2193 - RNA, 20 nt, synthetic construct
  source 1..20: mol_type = other RNA
gtacctagcatctgctgaat

SEQ ID NO: 2194 - RNA, 20 nt, synthetic construct
  source 1..20: mol_type = other RNA
gcgagtttccgtacctagca

SEQ ID NO: 2195 - RNA, 20 nt, synthetic construct
  source 1..20: mol_type = other RNA
taacctgcccccacttcagc

SEQ ID NO: 2196 - RNA, 20 nt, synthetic construct
  source 1..20: mol_type = other RNA
tatccccagaggcttcttaa

SEQ ID NO: 2197 - RNA, 20 nt, synthetic construct
  source 1..20: mol_type = other RNA
gacctaagtggtaacagcct

SEQ ID NO: 2198 - RNA, 20 nt, synthetic construct
  source 1..20: mol_type = other RNA
ctctccttacccttcagacc

SEQ ID NO: 2199 - RNA, 20 nt, synthetic construct
  source 1..20: mol_type = other RNA
ctctgcccagttggagccgg

SEQ ID NO: 2200 - RNA, 20 nt, synthetic construct
  source 1..20: mol_type = other RNA
ccacaggcagcctctcctcc

SEQ ID NO: 2201 - RNA, 20 nt, synthetic construct
  source 1..20: mol_type = other RNA
ccgctgccatgcgcagggag

SEQ ID NO: 2202 - RNA, 20 nt, synthetic construct
  source 1..20: mol_type = other RNA
agctcactgcaacctctgcc

SEQ ID NO: 2203 - RNA, 20 nt, synthetic construct
  source 1..20: mol_type = other RNA
agcgattctcctgcctcagc

SEQ ID NO: 2204 - RNA, 20 nt, synthetic construct
  source 1..20: mol_type = other RNA
cctgcctcagcctcccgagt

SEQ ID NO: 2205 - RNA, 20 nt, synthetic construct
  source 1..20: mol_type = other RNA
ccatgttggccaggctggtc

SEQ ID NO: 2206 - RNA, 20 nt, synthetic construct
  source 1..20: mol_type = other RNA
agaccagcctggccaacatg

SEQ ID NO: 2207 - RNA, 20 nt, synthetic construct
  source 1..20: mol_type = other RNA
aactcctgctagtgcctccc

SEQ ID NO: 2208 - RNA, 20 nt, synthetic construct
  source 1..20: mol_type = other RNA
agttgggctcagccaatggg

SEQ ID NO: 2209 - RNA, 20 nt, synthetic construct
  source 1..20: mol_type = other RNA
ccagcctgctcagtgcaaac

SEQ ID NO: 2210 - RNA, 20 nt, synthetic construct
  source 1..20: mol_type = other RNA
ccagccttctccagcctgct

SEQ ID NO: 2211 - RNA, 20 nt, synthetic construct
  source 1..20: mol_type = other RNA
gtttgtcccctagtctattc

SEQ ID NO: 2212 - RNA, 20 nt, synthetic construct
  source 1..20: mol_type = other RNA
ctccatgtccatcctgccca

SEQ ID NO: 2213 - RNA, 20 nt, synthetic construct
  source 1..20: mol_type = other RNA
gaatccttcctaaaaggaat

SEQ ID NO: 2214 - RNA, 20 nt, synthetic construct
  source 1..20: mol_type = other RNA
gaacttgacatcttgtctgg

SEQ ID NO: 2215 - RNA, 20 nt, synthetic construct
  source 1..20: mol_type = other RNA
taaaaggaatcctctatgcc

SEQ ID NO: 2216 - RNA, 20 nt, synthetic construct
  source 1..20: mol_type = other RNA
ttttaggaaggattctgaac

SEQ ID NO: 2217 - RNA, 20 nt, synthetic construct
  source 1..20: mol_type = other RNA
cgctccttgatcaggctggg

SEQ ID NO: 2218 - RNA, 20 nt, synthetic construct
  source 1..20: mol_type = other RNA
acttctcggggggctttggg

SEQ ID NO: 2219 - RNA, 20 nt, synthetic construct
  source 1..20: mol_type = other RNA
cggggggctttgggactcag

SEQ ID NO: 2220 - RNA, 20 nt, synthetic construct
  source 1..20: mol_type = other RNA
gtcccatccccatcccctgc

SEQ ID NO: 2221 - RNA, 20 nt, synthetic construct
  source 1..20: mol_type = other RNA
tgttgccccacaaatgcaaa

SEQ ID NO: 2222 - RNA, 20 nt, synthetic construct
  source 1..20: mol_type = other RNA
ttcttttctcttgttttcct

SEQ ID NO: 2223 - RNA, 20 nt, synthetic construct
  source 1..20: mol_type = other RNA
tttctcttgttttccttttc

SEQ ID NO: 2224 - RNA, 20 nt, synthetic construct
  source 1..20: mol_type = other RNA
cttgttttccttttctcacc

SEQ ID NO: 2225 - RNA, 20 nt, synthetic construct
  source 1..20: mol_type = other RNA
ttttctcaccatttggaatg

SEQ ID NO: 2226 - RNA, 20 nt, synthetic construct
  source 1..20: mol_type = other RNA
caccatttggaatggcccag

SEQ ID NO: 2227 - RNA, 20 nt, synthetic construct
  source 1..20: mol_type = other RNA
aaatggtgagaaaaggaaaa

SEQ ID NO: 2228 - RNA, 20 nt, synthetic construct
  source 1..20: mol_type = other RNA
aaggtaagtgcagcctgctg

SEQ ID NO: 2229 - RNA, 20 nt, synthetic construct
  source 1..20: mol_type = other RNA
tctgatggtgactctaccta

SEQ ID NO: 2230 - RNA, 20 nt, synthetic construct
  source 1..20: mol_type = other RNA
tgttttgctgctccacctgc

SEQ ID NO: 2231 - RNA, 20 nt, synthetic construct
  source 1..20: mol_type = other RNA
tggggctccctgcctgggcc

SEQ ID NO: 2232 - RNA, 20 nt, synthetic construct
  source 1..20: mol_type = other RNA
ctctaggcctttctttccac

SEQ ID NO: 2233 - RNA, 20 nt, synthetic construct
  source 1..20: mol_type = other RNA
ttccactgttccctctgcct

SEQ ID NO: 2234 - RNA, 20 nt, synthetic construct
  source 1..20: mol_type = other RNA
actgttccctctgcctggtg

SEQ ID NO: 2235 - RNA, 20 nt, synthetic construct
  source 1..20: mol_type = other RNA
ctctgcctggtgtggcctgg

SEQ ID NO: 2236 - RNA, 20 nt, synthetic construct
  source 1..20: mol_type = other RNA
atagccaggccacaccaggc

SEQ ID NO: 2237 - RNA, 20 nt, synthetic construct
  source 1..20: mol_type = other RNA
atggccgctcctcctccctc

SEQ ID NO: 2238 - RNA, 20 nt, synthetic construct
  source 1..20: mol_type = other RNA
agcagggacttgcaggtggc

SEQ ID NO: 2239 - RNA, 20 nt, synthetic construct
  source 1..20: mol_type = other RNA
gtcggggaagactctagatg

SEQ ID NO: 2240 - RNA, 20 nt, synthetic construct
  source 1..20: mol_type = other RNA
ccgactgaattgccacctgc

SEQ ID NO: 2241 - RNA, 20 nt, synthetic construct
  source 1..20: mol_type = other RNA
ctcctcaggccaggtgcatc

SEQ ID NO: 2242 - RNA, 20 nt, synthetic construct
  source 1..20: mol_type = other RNA
ttctctcctcaggccaggtg

SEQ ID NO: 2243 - RNA, 20 nt, synthetic construct
  source 1..20: mol_type = other RNA
agttggactgtgttaagttt

SEQ ID NO: 2244 - RNA, 20 nt, synthetic construct
  source 1..20: mol_type = other RNA
ccccaagctctgcgtcctgg

SEQ ID NO: 2245 - RNA, 20 nt, synthetic construct
  source 1..20: mol_type = other RNA
ccccttaccggttctcgtgg

SEQ ID NO: 2246 - RNA, 20 nt, synthetic construct
  source 1..20: mol_type = other RNA
cgtgggatcttgggaagcca

SEQ ID NO: 2247 - RNA, 20 nt, synthetic construct
  source 1..20: mol_type = other RNA
caagatcccacgagaaccgg

SEQ ID NO: 2248 - RNA, 20 nt, synthetic construct
  source 1..20: mol_type = other RNA
tctatgagctttgtcgttct

SEQ ID NO: 2249 - RNA, 20 nt, synthetic construct
  source 1..20: mol_type = other RNA
atgagctttgtcgttcttgt

SEQ ID NO: 2250 - RNA, 20 nt, synthetic construct
  source 1..20: mol_type = other RNA
tgtctgtaaaatgggcacat

SEQ ID NO: 2251 - RNA, 20 nt, synthetic construct
  source 1..20: mol_type = other RNA
cacaggttgctgtgagactc

SEQ ID NO: 2252 - RNA, 20 nt, synthetic construct
  source 1..20: mol_type = other RNA
actcattggagtctcacagc

SEQ ID NO: 2253 - RNA, 20 nt, synthetic construct
  source 1..20: mol_type = other RNA
aaaagcatctgcacatcctt

SEQ ID NO: 2254 - RNA, 20 nt, synthetic construct
  source 1..20: mol_type = other RNA
cttccaaaagcatctgcaca

SEQ ID NO: 2255 - RNA, 20 nt, synthetic construct
  source 1..20: mol_type = other RNA
ccacacccagcccaccagct

SEQ ID NO: 2256 - RNA, 20 nt, synthetic construct
  source 1..20: mol_type = other RNA
gctgctgccacccttgccag

SEQ ID NO: 2257 - RNA, 20 nt, synthetic construct
  source 1..20: mol_type = other RNA
tacagaggagctgtcctctc

SEQ ID NO: 2258 - RNA, 20 nt, synthetic construct
  source 1..20: mol_type = other RNA
tttccaaccaggtgagacct

SEQ ID NO: 2259 - RNA, 20 nt, synthetic construct
  source 1..20: mol_type = other RNA
aaccaggtgagacctcttca

SEQ ID NO: 2260 - RNA, 20 nt, synthetic construct
  source 1..20: mol_type = other RNA
gtggagccctggagccccct

SEQ ID NO: 2261 - RNA, 20 nt, synthetic construct
  source 1..20: mol_type = other RNA
cagtccctgcctggactggg

SEQ ID NO: 2262 - RNA, 20 nt, synthetic construct
  source 1..20: mol_type = other RNA
tagcactgctgtgacaaatt

SEQ ID NO: 2263 - RNA, 20 nt, synthetic construct
  source 1..20: mol_type = other RNA
aaccgagggggtggtaattt

SEQ ID NO: 2264 - RNA, 20 nt, synthetic construct
  source 1..20: mol_type = other RNA
ctgcagtcctggaggccaga

SEQ ID NO: 2265 - RNA, 20 nt, synthetic construct
  source 1..20: mol_type = other RNA
ggcctccaggactgcagaga

SEQ ID NO: 2266 - RNA, 20 nt, synthetic construct
  source 1..20: mol_type = other RNA
ggcttctggcctccaggact

SEQ ID NO: 2267 - RNA, 20 nt, synthetic construct
  source 1..20: mol_type = other RNA
cccggggggctccagggaga

SEQ ID NO: 2268 - RNA, 20 nt, synthetic construct
  source 1..20: mol_type = other RNA
ccctggagccccccgggaga

SEQ ID NO: 2269 - RNA, 20 nt, synthetic construct
  source 1..20: mol_type = other RNA
cttgcctcttccgtgtccca

SEQ ID NO: 2270 - RNA, 20 nt, synthetic construct
  source 1..20: mol_type = other RNA
gtgtcccaacagcggcagca

SEQ ID NO: 2271 - RNA, 20 nt, synthetic construct
  source 1..20: mol_type = other RNA
cacagccttctctgtgtctc

SEQ ID NO: 2272 - RNA, 20 nt, synthetic construct
  source 1..20: mol_type = other RNA
ctgtgtctctctcctcttca

SEQ ID NO: 2273 - RNA, 20 nt, synthetic construct
  source 1..20: mol_type = other RNA
ttgtctcataaggacacttg

SEQ ID NO: 2274 - RNA, 20 nt, synthetic construct
  source 1..20: mol_type = other RNA
ccacatgagatcatcctgga

SEQ ID NO: 2275 - RNA, 20 nt, synthetic construct
  source 1..20: mol_type = other RNA
aaataaggtcacagccacag

SEQ ID NO: 2276 - RNA, 20 nt, synthetic construct
  source 1..20: mol_type = other RNA
ctcctctcccttgggccaga

SEQ ID NO: 2277 - RNA, 20 nt, synthetic construct
  source 1..20: mol_type = other RNA
ggcccaagggagaggaggga

SEQ ID NO: 2278 - RNA, 20 nt, synthetic construct
  source 1..20: mol_type = other RNA
tccccataggatgcccatgg

SEQ ID NO: 2279 - RNA, 20 nt, synthetic construct
  source 1..20: mol_type = other RNA
ccataggatgcccatggatt

SEQ ID NO: 2280 - RNA, 20 nt, synthetic construct
  source 1..20: mol_type = other RNA
cgcttcccccgagtgtctgt

SEQ ID NO: 2281 - RNA, 20 nt, synthetic construct
  source 1..20: mol_type = other RNA
cccgagtgtctgtgggaggt

SEQ ID NO: 2282 - RNA, 20 nt, synthetic construct
  source 1..20: mol_type = other RNA
tgccacctcccacagacact

SEQ ID NO: 2283 - RNA, 20 nt, synthetic construct
  source 1..20: mol_type = other RNA
acacccctgcctgccattcc

SEQ ID NO: 2284 - RNA, 20 nt, synthetic construct
  source 1..20: mol_type = other RNA
ggagtcatatcaagggcttg

SEQ ID NO: 2285 - RNA, 20 nt, synthetic construct
  source 1..20: mol_type = other RNA
tccagccaagcccttgatat

SEQ ID NO: 2286 - RNA, 20 nt, synthetic construct
  source 1..20: mol_type = other RNA
tcattcatggggaggccaca

SEQ ID NO: 2287 - RNA, 20 nt, synthetic construct
  source 1..20: mol_type = other RNA
ttcatggggaggccacaagc

SEQ ID NO: 2288 - RNA, 20 nt, synthetic construct
  source 1..20: mol_type = other RNA
tggggaggccacaagcatgg

SEQ ID NO: 2289 - RNA, 20 nt, synthetic construct
  source 1..20: mol_type = other RNA
ggttcctctgcaaaagggag

SEQ ID NO: 2290 - RNA, 20 nt, synthetic construct
  source 1..20: mol_type = other RNA
tctgcaaaagggaggtaatg

SEQ ID NO: 2291 - RNA, 20 nt, synthetic construct
  source 1..20: mol_type = other RNA
ctgtcaggtattgagtgagg

SEQ ID NO: 2292 - RNA, 20 nt, synthetic construct
  source 1..20: mol_type = other RNA
tttcttaccattcaataata

SEQ ID NO: 2293 - RNA, 20 nt, synthetic construct
  source 1..20: mol_type = other RNA
taccattcaataataacgtt

SEQ ID NO: 2294 - RNA, 20 nt, synthetic construct
  source 1..20: mol_type = other RNA
ataataacgttttgagcacc

SEQ ID NO: 2295 - RNA, 20 nt, synthetic construct
  source 1..20: mol_type = other RNA
catttgtatccccagcacct

SEQ ID NO: 2296 - RNA, 20 nt, synthetic construct
  source 1..20: mol_type = other RNA
ttcacatttgtatccccagc

SEQ ID NO: 2297 - RNA, 20 nt, synthetic construct
  source 1..20: mol_type = other RNA
tttcattcacatttgtatcc

SEQ ID NO: 2298 - RNA, 20 nt, synthetic construct
  source 1..20: mol_type = other RNA
cccaacagtgtatccagaag

SEQ ID NO: 2299 - RNA, 20 nt, synthetic construct
  source 1..20: mol_type = other RNA
ggatacactgttgggggaag

SEQ ID NO: 2300 - RNA, 20 nt, synthetic construct
  source 1..20: mol_type = other RNA
ttaaacaaatgctacttgac

SEQ ID NO: 2301 - RNA, 20 nt, synthetic construct
  source 1..20: mol_type = other RNA
ggataggctgagagctctga

SEQ ID NO: 2302 - RNA, 20 nt, synthetic construct
  source 1..20: mol_type = other RNA
gagctctcagcctatccaga

SEQ ID NO: 2303 - RNA, 20 nt, synthetic construct
  source 1..20: mol_type = other RNA
gctggatacacaggctcgca

SEQ ID NO: 2304 - RNA, 20 nt, synthetic construct
  source 1..20: mol_type = other RNA
tgatccttctgctggataca

SEQ ID NO: 2305 - RNA, 20 nt, synthetic construct
  source 1..20: mol_type = other RNA
tggaggaagcgctgttctag

SEQ ID NO: 2306 - RNA, 20 nt, synthetic construct
  source 1..20: mol_type = other RNA
tccaggaatcctttcctgat

SEQ ID NO: 2307 - RNA, 20 nt, synthetic construct
  source 1..20: mol_type = other RNA
agccaagacctacgggggca

SEQ ID NO: 2308 - RNA, 20 nt, synthetic construct
  source 1..20: mol_type = other RNA
actgcttggacaccgtcccc

SEQ ID NO: 2309 - RNA, 20 nt, synthetic construct
  source 1..20: mol_type = other RNA
ttccactgcttggacaccgt

SEQ ID NO: 2310 - RNA, 20 nt, synthetic construct
  source 1..20: mol_type = other RNA
atccacgttcattccactgc

SEQ ID NO: 2311 - RNA, 20 nt, synthetic construct
  source 1..20: mol_type = other RNA
gcacaggccacactccctcc

SEQ ID NO: 2312 - RNA, 20 nt, synthetic construct
  source 1..20: mol_type = other RNA
catctgacctggaggccacc

SEQ ID NO: 2313 - RNA, 20 nt, synthetic construct
  source 1..20: mol_type = other RNA
tttcacatctgacctggagg

SEQ ID NO: 2314 - RNA, 20 nt, synthetic construct
  source 1..20: mol_type = other RNA
tcctttcacatctgacctgg

SEQ ID NO: 2315 - RNA, 20 nt, synthetic construct
  source 1..20: mol_type = other RNA
caggcgtatggcagggctgc

SEQ ID NO: 2316 - RNA, 20 nt, synthetic construct
  source 1..20: mol_type = other RNA
ctctcaccaggcagccctgc

SEQ ID NO: 2317 - RNA, 20 nt, synthetic construct
  source 1..20: mol_type = other RNA
agaggctggaagaggccact

SEQ ID NO: 2318 - RNA, 20 nt, synthetic construct
  source 1..20: mol_type = other RNA
agcctctggaaagctctgtg

SEQ ID NO: 2319 - RNA, 20 nt, synthetic construct
  source 1..20: mol_type = other RNA
tgaggccaccttgccacgct

SEQ ID NO: 2320 - RNA, 20 nt, synthetic construct
  source 1..20: mol_type = other RNA
ctgtgacagcgtggcaaggt

SEQ ID NO: 2321 - RNA, 20 nt, synthetic construct
  source 1..20: mol_type = other RNA
aaacccccgggtgaggcagg

SEQ ID NO: 2322 - RNA, 20 nt, synthetic construct
  source 1..20: mol_type = other RNA
taggcctccctctatcttcc

SEQ ID NO: 2323 - RNA, 20 nt, synthetic construct
  source 1..20: mol_type = other RNA
agcctctcactggaaggaag

SEQ ID NO: 2324 - RNA, 20 nt, synthetic construct
  source 1..20: mol_type = other RNA
agtgagaggctggaaagggg

SEQ ID NO: 2325 - RNA, 20 nt, synthetic construct
  source 1..20: mol_type = other RNA
ttccagtgagaggctggaaa

SEQ ID NO: 2326 - RNA, 20 nt, synthetic construct
  source 1..20: mol_type = other RNA
tgtgggggcttttaccaggc

SEQ ID NO: 2327 - RNA, 20 nt, synthetic construct
  source 1..20: mol_type = other RNA
tgcccgctcacaccagccca

SEQ ID NO: 2328 - RNA, 20 nt, synthetic construct
  source 1..20: mol_type = other RNA
aagtgcaggcggttcctgcc

SEQ ID NO: 2329 - RNA, 20 nt, synthetic construct
  source 1..20: mol_type = other RNA
atctgccgctggggccacac

SEQ ID NO: 2330 - RNA, 20 nt, synthetic construct
  source 1..20: mol_type = other RNA
gctgcaagatgatgtgacca

SEQ ID NO: 2331 - RNA, 20 nt, synthetic construct
  source 1..20: mol_type = other RNA
ggtcccacccgtgcttggga

SEQ ID NO: 2332 - RNA, 20 nt, synthetic construct
  source 1..20: mol_type = other RNA
ctcctcacacacgacgagga

SEQ ID NO: 2333 - RNA, 20 nt, synthetic construct
  source 1..20: mol_type = other RNA
tcgtcgtgtgtgaggaggga

SEQ ID NO: 2334 - RNA, 20 nt, synthetic construct
  source 1..20: mol_type = other RNA
agtccatgttcctcgtcgtg

SEQ ID NO: 2335 - RNA, 20 nt, synthetic construct
  source 1..20: mol_type = other RNA
gctcgatgtgcgttgtgtgg

SEQ ID NO: 2336 - RNA, 20 nt, synthetic construct
  source 1..20: mol_type = other RNA
ctccctggacgtaagccaca

SEQ ID NO: 2337 - RNA, 20 nt, synthetic construct
  source 1..20: mol_type = other RNA
agataagcctgtattccccg

SEQ ID NO: 2338 - RNA, 20 nt, synthetic construct
  source 1..20: mol_type = other RNA
ccgggctgtctgccaatgta

SEQ ID NO: 2339 - RNA, 20 nt, synthetic construct
  source 1..20: mol_type = other RNA
aggctgacgggacaactgga

SEQ ID NO: 2340 - RNA, 20 nt, synthetic construct
  source 1..20: mol_type = other RNA
ctcagagcttccaggctgac

SEQ ID NO: 2341 - RNA, 20 nt, synthetic construct
  source 1..20: mol_type = other RNA
tgagcacctgtatcccctgc

SEQ ID NO: 2342 - RNA, 20 nt, synthetic construct
  source 1..20: mol_type = other RNA
acattccatagcccagctca

SEQ ID NO: 2343 - RNA, 20 nt, synthetic construct
  source 1..20: mol_type = other RNA
atagcccagctcaatatcta

SEQ ID NO: 2344 - RNA, 20 nt, synthetic construct
  source 1..20: mol_type = other RNA
tctagggtggcgagcactgt

SEQ ID NO: 2345 - RNA, 20 nt, synthetic construct
  source 1..20: mol_type = other RNA
ggtcggagctcacagcgctc

SEQ ID NO: 2346 - RNA, 20 nt, synthetic construct
  source 1..20: mol_type = other RNA
cagtgtagcaccgggcacat

SEQ ID NO: 2347 - RNA, 20 nt, synthetic construct
  source 1..20: mol_type = other RNA
ctcatcaataggcatctacc

SEQ ID NO: 2348 - RNA, 20 nt, synthetic construct
  source 1..20: mol_type = other RNA
gtagcatgctgagcaggtcc

SEQ ID NO: 2349 - RNA, 20 nt, synthetic construct
  source 1..20: mol_type = other RNA
tctgtagcatgctgagcagg

SEQ ID NO: 2350 - RNA, 20 nt, synthetic construct
  source 1..20: mol_type = other RNA
tgccgagactggaggcctta

SEQ ID NO: 2351 - RNA, 20 nt, synthetic construct
  source 1..20: mol_type = other RNA
gactgtgcccagacctacta

SEQ ID NO: 2352 - RNA, 20 nt, synthetic construct
  source 1..20: mol_type = other RNA
ggcaaggtcggcccccagtc

SEQ ID NO: 2353 - RNA, 20 nt, synthetic construct
  source 1..20: mol_type = other RNA
tgtgggatctcagagcagcc

SEQ ID NO: 2354 - RNA, 20 nt, synthetic construct
  source 1..20: mol_type = other RNA
gtggctgctctgagatccca

SEQ ID NO: 2355 - RNA, 20 nt, synthetic construct
  source 1..20: mol_type = other RNA
ccaaataaggtctggctcac

SEQ ID NO: 2356 - RNA, 20 nt, synthetic construct
  source 1..20: mol_type = other RNA
ctcataaagacacatcacag

SEQ ID NO: 2357 - RNA, 20 nt, synthetic construct
  source 1..20: mol_type = other RNA
ccaatctccacctctgtctc

SEQ ID NO: 2358 - RNA, 20 nt, synthetic construct
  source 1..20: mol_type = other RNA
ctggcttgtggccacatttc

SEQ ID NO: 2359 - RNA, 20 nt, synthetic construct
  source 1..20: mol_type = other RNA
ggtggctgctggtgttccct

SEQ ID NO: 2360 - RNA, 20 nt, synthetic construct
  source 1..20: mol_type = other RNA
ggcttctggtggctgctggt

SEQ ID NO: 2361 - RNA, 20 nt, synthetic construct
  source 1..20: mol_type = other RNA
tcccagagccttcgctgctg

SEQ ID NO: 2362 - RNA, 20 nt, synthetic construct
  source 1..20: mol_type = other RNA
cagagccttcgctgctgagt

SEQ ID NO: 2363 - RNA, 20 nt, synthetic construct
  source 1..20: mol_type = other RNA
ctgctgagtctgggaatttg

SEQ ID NO: 2364 - RNA, 20 nt, synthetic construct
  source 1..20: mol_type = other RNA
cagactcagcagcgaaggct

SEQ ID NO: 2365 - RNA, 20 nt, synthetic construct
  source 1..20: mol_type = other RNA
gtcacaaattcccagactca

SEQ ID NO: 2366 - RNA, 20 nt, synthetic construct
  source 1..20: mol_type = other RNA
tatggcttcggtcacaaatt

SEQ ID NO: 2367 - RNA, 20 nt, synthetic construct
  source 1..20: mol_type = other RNA
catctcaggacaggtgagca

SEQ ID NO: 2368 - RNA, 20 nt, synthetic construct
  source 1..20: mol_type = other RNA
gatggcacttcagaagactc

SEQ ID NO: 2369 - RNA, 20 nt, synthetic construct
  source 1..20: mol_type = other RNA
gaagactcaggagaccctgg

SEQ ID NO: 2370 - RNA, 20 nt, synthetic construct
  source 1..20: mol_type = other RNA
gaagtgccatctgaacagca

SEQ ID NO: 2371 - RNA, 20 nt, synthetic construct
  source 1..20: mol_type = other RNA
acctgaggccctgcttttcc

SEQ ID NO: 2372 - RNA, 20 nt, synthetic construct
  source 1..20: mol_type = other RNA
tggctgcaggggttccaggg

SEQ ID NO: 2373 - RNA, 20 nt, synthetic construct
  source 1..20: mol_type = other RNA
agggccaggccatttccgct

SEQ ID NO: 2374 - RNA, 20 nt, synthetic construct
  source 1..20: mol_type = other RNA
gctggcgcaggactctgcta

SEQ ID NO: 2375 - RNA, 20 nt, synthetic construct
  source 1..20: mol_type = other RNA
ggcaggttgctgctagcaga

SEQ ID NO: 2376 - RNA, 20 nt, synthetic construct
  source 1..20: mol_type = other RNA
tttggcctggctgagagttt

SEQ ID NO: 2377 - RNA, 20 nt, synthetic construct
  source 1..20: mol_type = other RNA
gagacctgcgctggagcgga

SEQ ID NO: 2378 - RNA, 20 nt, synthetic construct
  source 1..20: mol_type = other RNA
ttccttgcttcctttcttcc

SEQ ID NO: 2379 - RNA, 20 nt, synthetic construct
  source 1..20: mol_type = other RNA
ttgcttcctttcttcctctc

SEQ ID NO: 2380 - RNA, 20 nt, synthetic construct
  source 1..20: mol_type = other RNA
tttcttcctctctcccttct

SEQ ID NO: 2381 - RNA, 20 nt, synthetic construct
  source 1..20: mol_type = other RNA
tcctctctcccttctccatc

SEQ ID NO: 2382 - RNA, 20 nt, synthetic construct
  source 1..20: mol_type = other RNA
tctctcccttctccatccag

SEQ ID NO: 2383 - RNA, 20 nt, synthetic construct
  source 1..20: mol_type = other RNA
ccatccagcaggctggacct

SEQ ID NO: 2384 - RNA, 20 nt, synthetic construct
  source 1..20: mol_type = other RNA
cctataccctaacctttgtc

SEQ ID NO: 2385 - RNA, 20 nt, synthetic construct
  source 1..20: mol_type = other RNA
tggagaatccaaactgatcc

SEQ ID NO: 2386 - RNA, 20 nt, synthetic construct
  source 1..20: mol_type = other RNA
ccaagaagcaggcactgggg

SEQ ID NO: 2387 - RNA, 20 nt, synthetic construct
  source 1..20: mol_type = other RNA
ctgaggttgtgactcgtgtg

SEQ ID NO: 2388 - RNA, 20 nt, synthetic construct
  source 1..20: mol_type = other RNA
gcctcacacgagtcacaacc

SEQ ID NO: 2389 - RNA, 20 nt, synthetic construct
  source 1..20: mol_type = other RNA
ccactccacaagataccagg

SEQ ID NO: 2390 - RNA, 20 nt, synthetic construct
  source 1..20: mol_type = other RNA
tgtctctaaaatgagccggc

SEQ ID NO: 2391 - RNA, 20 nt, synthetic construct
  source 1..20: mol_type = other RNA
cctttgagtctttaaatctt

SEQ ID NO: 2392 - RNA, 20 nt, synthetic construct
  source 1..20: mol_type = other RNA
tgcagactcggtgagctgtg

SEQ ID NO: 2393 - RNA, 20 nt, synthetic construct
  source 1..20: mol_type = other RNA
cagctcaccgagtctgcaag

SEQ ID NO: 2394 - RNA, 20 nt, synthetic construct
  source 1..20: mol_type = other RNA
aaaaatagtatcaaagtgta

SEQ ID NO: 2395 - RNA, 20 nt, synthetic construct
  source 1..20: mol_type = other RNA
tattattgttagatattgat

SEQ ID NO: 2396 - RNA, 20 nt, synthetic construct
  source 1..20: mol_type = other RNA
tatgaaggagcaggatgact

SEQ ID NO: 2397 - RNA, 20 nt, synthetic construct
  source 1..20: mol_type = other RNA
tatgaatatcaatatctaac

SEQ ID NO: 2398 - RNA, 20 nt, synthetic construct
  source 1..20: mol_type = other RNA
tggcagtagcattgccagct

SEQ ID NO: 2399 - RNA, 20 nt, synthetic construct
  source 1..20: mol_type = other RNA
ttgtctatgaaatacattat

SEQ ID NO: 2400 - RNA, 20 nt, synthetic construct
  source 1..20: mol_type = other RNA
tagacaaggaaagggaggcc

SEQ ID NO: 2401 - RNA, 20 nt, synthetic construct
  source 1..20: mol_type = other RNA
ataatgtatttcatagacaa

SEQ ID NO: 2402 - RNA, 20 nt, synthetic construct
  source 1..20: mol_type = other RNA
ctcgtttaacctccaaaaaa

SEQ ID NO: 2403 - RNA, 20 nt, synthetic construct
  source 1..20: mol_type = other RNA
ccagtgcctgggatgtgctc

SEQ ID NO: 2404 - RNA, 20 nt, synthetic construct
  source 1..20: mol_type = other RNA
aaggcgacatttgtgggaga

SEQ ID NO: 2405 - RNA, 20 nt, synthetic construct
  source 1..20: mol_type = other RNA
cacaactgatggcagggagg

SEQ ID NO: 2406 - RNA, 20 nt, synthetic construct
  source 1..20: mol_type = other RNA
tggttaggagacattagctc

SEQ ID NO: 2407 - RNA, 20 nt, synthetic construct
  source 1..20: mol_type = other RNA
ctggctctgcggcagaggct

SEQ ID NO: 2408 - RNA, 20 nt, synthetic construct
  source 1..20: mol_type = other RNA
cagtggccacgagtgcagat

SEQ ID NO: 2409 - RNA, 20 nt, synthetic construct
  source 1..20: mol_type = other RNA
tctgcactcgtggccactgg

SEQ ID NO: 2410 - RNA, 20 nt, synthetic construct
  source 1..20: mol_type = other RNA
tcatctgcactcgtggccac

SEQ ID NO: 2411 - RNA, 20 nt, synthetic construct
  source 1..20: mol_type = other RNA
gccttgaccctgggtcaatg

SEQ ID NO: 2412 - RNA, 20 nt, synthetic construct
  source 1..20: mol_type = other RNA
acagttccacactgctcccc

SEQ ID NO: 2413 - RNA, 20 nt, synthetic construct
  source 1..20: mol_type = other RNA
acactgctccccttttaaaa

SEQ ID NO: 2414 - RNA, 20 nt, synthetic construct
  source 1..20: mol_type = other RNA
atgtggagggactcgaggtg

SEQ ID NO: 2415 - RNA, 20 nt, synthetic construct
  source 1..20: mol_type = other RNA
atcttctgcttgcatacctc

SEQ ID NO: 2416 - RNA, 20 nt, synthetic construct
  source 1..20: mol_type = other RNA
gcttgcatacctctgagacc

SEQ ID NO: 2417 - RNA, 20 nt, synthetic construct
  source 1..20: mol_type = other RNA
tccaccacatctgcctggcc

SEQ ID NO: 2418 - RNA, 20 nt, synthetic construct
  source 1..20: mol_type = other RNA
agactgtgactacatttagt

SEQ ID NO: 2419 - RNA, 20 nt, synthetic construct
  source 1..20: mol_type = other RNA
taggggggccgctgggtgga

SEQ ID NO: 2420 - RNA, 20 nt, synthetic construct
  source 1..20: mol_type = other RNA
caactggacttcataggggg

SEQ ID NO: 2421 - RNA, 20 nt, synthetic construct
  source 1..20: mol_type = other RNA
ctgtccaccggcccccagag

SEQ ID NO: 2422 - RNA, 20 nt, synthetic construct
  source 1..20: mol_type = other RNA
ctcccttactgacttccttc

SEQ ID NO: 2423 - RNA, 20 nt, synthetic construct
  source 1..20: mol_type = other RNA
ttctgtggccagacattgag

SEQ ID NO: 2424 - RNA, 20 nt, synthetic construct
  source 1..20: mol_type = other RNA
gtggccagacattgagcaag

SEQ ID NO: 2425 - RNA, 20 nt, synthetic construct
  source 1..20: mol_type = other RNA
tcaactatttagcagctacg

SEQ ID NO: 2426 - RNA, 20 nt, synthetic construct
  source 1..20: mol_type = other RNA
ccagcttgagctgtgcgacc

SEQ ID NO: 2427 - RNA, 20 nt, synthetic construct
  source 1..20: mol_type = other RNA
cagcgagttccccagcttga

SEQ ID NO: 2428 - RNA, 20 nt, synthetic construct
  source 1..20: mol_type = other RNA
actgtaagccccagccccca

SEQ ID NO: 2429 - RNA, 20 nt, synthetic construct
  source 1..20: mol_type = other RNA
aaggctgagaaggcccagga

SEQ ID NO: 2430 - RNA, 20 nt, synthetic construct
  source 1..20: mol_type = other RNA
cagcctttgaaacaggctag

SEQ ID NO: 2431 - RNA, 20 nt, synthetic construct
  source 1..20: mol_type = other RNA
gccctgagactttcctacag

SEQ ID NO: 2432 - RNA, 20 nt, synthetic construct
  source 1..20: mol_type = other RNA
tacagagtacaggttttgat

SEQ ID NO: 2433 - RNA, 20 nt, synthetic construct
  source 1..20: mol_type = other RNA
gttttaaaggcaagaatcaa

SEQ ID NO: 2434 - RNA, 20 nt, synthetic construct
  source 1..20: mol_type = other RNA
tgcctttaaaactgaacatc

SEQ ID NO: 2435 - RNA, 20 nt, synthetic construct
  source 1..20: mol_type = other RNA
gccccatcaggtgacccctt

SEQ ID NO: 2436 - RNA, 20 nt, synthetic construct
  source 1..20: mol_type = other RNA
tgaaggtcagtgtgtggagg

SEQ ID NO: 2437 - RNA, 20 nt, synthetic construct
  source 1..20: mol_type = other RNA
ggaactgacctgactgagcc

SEQ ID NO: 2438 - RNA, 20 nt, synthetic construct
  source 1..20: mol_type = other RNA
ttcccagaaaggccttcccc

SEQ ID NO: 2439 - RNA, 20 nt, synthetic construct
  source 1..20: mol_type = other RNA
cagaaaggccttccccaggc

SEQ ID NO: 2440 - RNA, 20 nt, synthetic construct
  source 1..20: mol_type = other RNA
gggaaagaacagcctcccct

SEQ ID NO: 2441 - RNA, 20 nt, synthetic construct
  source 1..20: mol_type = other RNA
ccaggcctggtgctctggcc

SEQ ID NO: 2442 - RNA, 20 nt, synthetic construct
  source 1..20: mol_type = other RNA
tggagaagtcccttctttgg

SEQ ID NO: 2443 - RNA, 20 nt, synthetic construct
  source 1..20: mol_type = other RNA
ccaggaagtcctccagaggc

SEQ ID NO: 2444 - RNA, 20 nt, synthetic construct
  source 1..20: mol_type = other RNA
ttggggtcccagtcagtgta

SEQ ID NO: 2445 - RNA, 20 nt, synthetic construct
  source 1..20: mol_type = other RNA
catacactgactgggacccc

SEQ ID NO: 2446 - RNA, 20 nt, synthetic construct
  source 1..20: mol_type = other RNA
ttgccactgccatttcctcc

SEQ ID NO: 2447 - RNA, 20 nt, synthetic construct
  source 1..20: mol_type = other RNA
tcctctgtaagcaggtgatt

SEQ ID NO: 2448 - RNA, 20 nt, synthetic construct
  source 1..20: mol_type = other RNA
agaccagcctgttcaacatg

SEQ ID NO: 2449 - RNA, 20 nt, synthetic construct
  source 1..20: mol_type = other RNA
acatggtgaaaccccgtctc

SEQ ID NO: 2450 - RNA, 20 nt, synthetic construct
  source 1..20: mol_type = other RNA
ccatgttgaacaggctggtc

SEQ ID NO: 2451 - RNA, 20 nt, synthetic construct
  source 1..20: mol_type = other RNA
cctgccttagcctcccaagt

SEQ ID NO: 2452 - RNA, 20 nt, synthetic construct
  source 1..20: mol_type = other RNA
agcgattctcctgccttagc

SEQ ID NO: 2453 - RNA, 20 nt, synthetic construct
  source 1..20: mol_type = other RNA
atctcaaaaataaataagta

SEQ ID NO: 2454 - RNA, 20 nt, synthetic construct
  source 1..20: mol_type = other RNA
tcacctccacactcagtgcc

SEQ ID NO: 2455 - RNA, 20 nt, synthetic construct
  source 1..20: mol_type = other RNA
cctccacactcagtgccact

SEQ ID NO: 2456 - RNA, 20 nt, synthetic construct
  source 1..20: mol_type = other RNA
agctccatccttggccacgg

SEQ ID NO: 2457 - RNA, 20 nt, synthetic construct
  source 1..20: mol_type = other RNA
ggatcctggcctctaagatg

SEQ ID NO: 2458 - RNA, 20 nt, synthetic construct
  source 1..20: mol_type = other RNA
cccctgtcaaatgaggtgtg

SEQ ID NO: 2459 - RNA, 20 nt, synthetic construct
  source 1..20: mol_type = other RNA
aggtccccttgcacatcagg

SEQ ID NO: 2460 - RNA, 20 nt, synthetic construct
  source 1..20: mol_type = other RNA
aaccctctgccagcctgtga

SEQ ID NO: 2461 - RNA, 20 nt, synthetic construct
  source 1..20: mol_type = other RNA
ccgtgttagcaaggatggtc

SEQ ID NO: 2462 - RNA, 20 nt, synthetic construct
  source 1..20: mol_type = other RNA
cctgcctcagcctcctgagt

SEQ ID NO: 2463 - RNA, 20 nt, synthetic construct
  source 1..20: mol_type = other RNA
cgccattctcctgcctcagc

SEQ ID NO: 2464 - RNA, 20 nt, synthetic construct
  source 1..20: mol_type = other RNA
agacggagtctcgctctatt

SEQ ID NO: 2465 - RNA, 20 nt, synthetic construct
  source 1..20: mol_type = other RNA
ttccagacggagtctcgctc

SEQ ID NO: 2466 - RNA, 20 nt, synthetic construct
  source 1..20: mol_type = other RNA
ggcctcagtggcactccact

SEQ ID NO: 2467 - RNA, 20 nt, synthetic construct
  source 1..20: mol_type = other RNA
ttctggcctcagtggcactc

SEQ ID NO: 2468 - RNA, 20 nt, synthetic construct
  source 1..20: mol_type = other RNA
ttagacaatcctgggagcaa

SEQ ID NO: 2469 - RNA, 20 nt, synthetic construct
  source 1..20: mol_type = other RNA
cagagggcggggccacacag

SEQ ID NO: 2470 - RNA, 20 nt, synthetic construct
  source 1..20: mol_type = other RNA
agtttgtgtgggtccaacac

SEQ ID NO: 2471 - RNA, 20 nt, synthetic construct
  source 1..20: mol_type = other RNA
cccgccactctctgaggcct

SEQ ID NO: 2472 - RNA, 20 nt, synthetic construct
  source 1..20: mol_type = other RNA
ccacccaacttcccccgcca

SEQ ID NO: 2473 - RNA, 20 nt, synthetic construct
  source 1..20: mol_type = other RNA
cattcctctgaggctcatcc

SEQ ID NO: 2474 - RNA, 20 nt, synthetic construct
  source 1..20: mol_type = other RNA
tctgaggctcatcctcttgg

SEQ ID NO: 2475 - RNA, 20 nt, synthetic construct
  source 1..20: mol_type = other RNA
tggaaagggataataaggtt

SEQ ID NO: 2476 - RNA, 20 nt, synthetic construct
  source 1..20: mol_type = other RNA
atgaaagagaggcaccaaga

SEQ ID NO: 2477 - RNA, 20 nt, synthetic construct
  source 1..20: mol_type = other RNA
tatattcagacgcttagaca

SEQ ID NO: 2478 - RNA, 20 nt, synthetic construct
  source 1..20: mol_type = other RNA
gacgcttagacagagccagg

SEQ ID NO: 2479 - RNA, 20 nt, synthetic construct
  source 1..20: mol_type = other RNA
ctgtgcctggctctgtctaa

SEQ ID NO: 2480 - RNA, 20 nt, synthetic construct
  source 1..20: mol_type = other RNA
agtttgtattggtcaaggtt

SEQ ID NO: 2481 - RNA, 20 nt, synthetic construct
  source 1..20: mol_type = other RNA
gcagagaagcagaaccagta

SEQ ID NO: 2482 - RNA, 20 nt, synthetic construct
  source 1..20: mol_type = other RNA
ctgcagaaccttgaccaata

SEQ ID NO: 2483 - RNA, 20 nt, synthetic construct
  source 1..20: mol_type = other RNA
gcttctctgcagaaccttga

SEQ ID NO: 2484 - RNA, 20 nt, synthetic construct
  source 1..20: mol_type = other RNA
agctcatgtgaccgtgcggg

SEQ ID NO: 2485 - RNA, 20 nt, synthetic construct
  source 1..20: mol_type = other RNA
gacttgccagcccgcacggt

SEQ ID NO: 2486 - RNA, 20 nt, synthetic construct
  source 1..20: mol_type = other RNA
tgcagaatttgatgttgcaa

SEQ ID NO: 2487 - RNA, 20 nt, synthetic construct
  source 1..20: mol_type = other RNA
gcaggaattgccagcctgcc

SEQ ID NO: 2488 - RNA, 20 nt, synthetic construct
  source 1..20: mol_type = other RNA
gccccaggactgccttagga

SEQ ID NO: 2489 - RNA, 20 nt, synthetic construct
  source 1..20: mol_type = other RNA
ttcttccctgggaggcctca

SEQ ID NO: 2490 - RNA, 20 nt, synthetic construct
  source 1..20: mol_type = other RNA
tccctgggaggcctcagtct

SEQ ID NO: 2491 - RNA, 20 nt, synthetic construct
  source 1..20: mol_type = other RNA
ctgggaggcctcagtctgtt

SEQ ID NO: 2492 - RNA, 20 nt, synthetic construct
  source 1..20: mol_type = other RNA
cttaaggccttcaactgatt

SEQ ID NO: 2493 - RNA, 20 nt, synthetic construct
  source 1..20: mol_type = other RNA
actgattaaatgaggcctgc

SEQ ID NO: 2494 - RNA, 20 nt, synthetic construct
  source 1..20: mol_type = other RNA
gatttaaatgttagtcacat

SEQ ID NO: 2495 - RNA, 20 nt, synthetic construct
  source 1..20: mol_type = other RNA
cagcagcatttccactggct

SEQ ID NO: 2496 - RNA, 20 nt, synthetic construct
  source 1..20: mol_type = other RNA
actggcttttgaccaaacat

SEQ ID NO: 2497 - RNA, 20 nt, synthetic construct
  source 1..20: mol_type = other RNA
cagcccctcccttacaggca

SEQ ID NO: 2498 - RNA, 20 nt, synthetic construct
  source 1..20: mol_type = other RNA
tgtggcacgtgggcttcttg

SEQ ID NO: 2499 - RNA, 20 nt, synthetic construct
  source 1..20: mol_type = other RNA
tgtggcacgttcctggaggc

SEQ ID NO: 2500 - RNA, 20 nt, synthetic construct
  source 1..20: mol_type = other RNA
tggaggccgaacccttctgg

SEQ ID NO: 2501 - RNA, 20 nt, synthetic construct
  source 1..20: mol_type = other RNA
gcctccaggaacgtgccaca

SEQ ID NO: 2502 - RNA, 20 nt, synthetic construct
  source 1..20: mol_type = other RNA
ggctttggaaggagtcgtca

SEQ ID NO: 2503 - RNA, 20 nt, synthetic construct
  source 1..20: mol_type = other RNA
aaagccagaagggttcggcc

SEQ ID NO: 2504 - RNA, 20 nt, synthetic construct
  source 1..20: mol_type = other RNA
tccccagcctcccgcatggc

SEQ ID NO: 2505 - RNA, 20 nt, synthetic construct
  source 1..20: mol_type = other RNA
agccccttcctccccagcct

SEQ ID NO: 2506 - RNA, 20 nt, synthetic construct
  source 1..20: mol_type = other RNA
gactctgcgatgatggaggt

SEQ ID NO: 2507 - RNA, 20 nt, synthetic construct
  source 1..20: mol_type = other RNA
ggagggagagtggccaggac

SEQ ID NO: 2508 - RNA, 20 nt, synthetic construct
  source 1..20: mol_type = other RNA
ggtacccgccccctccccat

SEQ ID NO: 2509 - RNA, 20 nt, synthetic construct
  source 1..20: mol_type = other RNA
cattagccttgctcaagttg

SEQ ID NO: 2510 - RNA, 20 nt, synthetic construct
  source 1..20: mol_type = other RNA
tcgggtgagaggtctgagcc

SEQ ID NO: 2511 - RNA, 20 nt, synthetic construct
  source 1..20: mol_type = other RNA
cctagatacccgcagtgtcc

SEQ ID NO: 2512 - RNA, 20 nt, synthetic construct
  source 1..20: mol_type = other RNA
ttcccctagatacccgcagt

SEQ ID NO: 2513 - RNA, 20 nt, synthetic construct
  source 1..20: mol_type = other RNA
acttcaagtctggaacttca

SEQ ID NO: 2514 - RNA, 20 nt, synthetic construct
  source 1..20: mol_type = other RNA
agtctggaacttcaagtctg

SEQ ID NO: 2515 - RNA, 20 nt, synthetic construct
  source 1..20: mol_type = other RNA
agacttgaagtggaacaaga

SEQ ID NO: 2516 - RNA, 20 nt, synthetic construct
  source 1..20: mol_type = other RNA
agtctgtgtgtgtgcgtgcg

SEQ ID NO: 2517 - RNA, 20 nt, synthetic construct
  source 1..20: mol_type = other RNA
ctggcggccgaatttaaagg

SEQ ID NO: 2518 - RNA, 20 nt, synthetic construct
  source 1..20: mol_type = other RNA
gccgccagggaagccttgat

SEQ ID NO: 2519 - RNA, 20 nt, synthetic construct
  source 1..20: mol_type = other RNA
ccccgtggcacttagaacca

SEQ ID NO: 2520 - RNA, 20 nt, synthetic construct
  source 1..20: mol_type = other RNA
aagtgccacggggggaaact

SEQ ID NO: 2521 - RNA, 20 nt, synthetic construct
  source 1..20: mol_type = other RNA
gtgtatcaagtggttctaag

SEQ ID NO: 2522 - RNA, 20 nt, synthetic construct
  source 1..20: mol_type = other RNA
tatctcccccactaggatgt

SEQ ID NO: 2523 - RNA, 20 nt, synthetic construct
  source 1..20: mol_type = other RNA
caatgcccctgtggagttta

SEQ ID NO: 2524 - RNA, 20 nt, synthetic construct
  source 1..20: mol_type = other RNA
gcctgggcagtcagattttc

SEQ ID NO: 2525 - RNA, 20 nt, synthetic construct
  source 1..20: mol_type = other RNA
ttaggaggggacatttgagt

SEQ ID NO: 2526 - RNA, 20 nt, synthetic construct
  source 1..20: mol_type = other RNA
ctgccacccacctcctcacc

SEQ ID NO: 2527 - RNA, 20 nt, synthetic construct
  source 1..20: mol_type = other RNA
tctctggtccccctgcacag

SEQ ID NO: 2528 - RNA, 20 nt, synthetic construct
  source 1..20: mol_type = other RNA
aggacactcagtctgatgag

SEQ ID NO: 2529 - RNA, 20 nt, synthetic construct
  source 1..20: mol_type = other RNA
tctgtgcactcgcctccctc

SEQ ID NO: 2530 - RNA, 20 nt, synthetic construct
  source 1..20: mol_type = other RNA
ctgaccctcgggctgggcag

SEQ ID NO: 2531 - RNA, 20 nt, synthetic construct
  source 1..20: mol_type = other RNA
tccatcaagctcccgatcaa

SEQ ID NO: 2532 - RNA, 20 nt, synthetic construct
  source 1..20: mol_type = other RNA
cctggccgataagacagcaa

SEQ ID NO: 2533 - RNA, 20 nt, synthetic construct
  source 1..20: mol_type = other RNA
agaagagagcttagtgtctg

SEQ ID NO: 2534 - RNA, 20 nt, synthetic construct
  source 1..20: mol_type = other RNA
cgaaggtaagccgcctgcag

SEQ ID NO: 2535 - RNA, 20 nt, synthetic construct
  source 1..20: mol_type = other RNA
ccattcacccctgcaccagg

SEQ ID NO: 2536 - RNA, 20 nt, synthetic construct
  source 1..20: mol_type = other RNA
cccttgtctgtgtaaggagg

SEQ ID NO: 2537 - RNA, 20 nt, synthetic construct
  source 1..20: mol_type = other RNA
catttaatcctatttaaggt

SEQ ID NO: 2538 - RNA, 20 nt, synthetic construct
  source 1..20: mol_type = other RNA
gagccccattctcatttaat

SEQ ID NO: 2539 - RNA, 20 nt, synthetic construct
  source 1..20: mol_type = other RNA
taacgtgtttttatagagac

SEQ ID NO: 2540 - RNA, 20 nt, synthetic construct
  source 1..20: mol_type = other RNA
ttaagccctcctctctccta

SEQ ID NO: 2541 - RNA, 20 nt, synthetic construct
  source 1..20: mol_type = other RNA
tggtaggagagaggagggct

SEQ ID NO: 2542 - RNA, 20 nt, synthetic construct
  source 1..20: mol_type = other RNA
tgtgtgtgtgtgtgtgtgtg

SEQ ID NO: 2543 - RNA, 20 nt, synthetic construct
  source 1..20: mol_type = other RNA
gtaagcttacagggctggcc

SEQ ID NO: 2544 - RNA, 20 nt, synthetic construct
  source 1..20: mol_type = other RNA
cgcggctgggggctgctgga

SEQ ID NO: 2545 - RNA, 20 nt, synthetic construct
  source 1..20: mol_type = other RNA
cgctgtggctctctccagca

SEQ ID NO: 2546 - RNA, 20 nt, synthetic construct
  source 1..20: mol_type = other RNA
tagaggctgcaggacagtgc

SEQ ID NO: 2547 - RNA, 20 nt, synthetic construct
  source 1..20: mol_type = other RNA
atgctcacctgggtgtgagc

SEQ ID NO: 2548 - RNA, 20 nt, synthetic construct
  source 1..20: mol_type = other RNA
gggagctgagaaatctcaaa

SEQ ID NO: 2549 - RNA, 20 nt, synthetic construct
  source 1..20: mol_type = other RNA
cagctcccagaaccatggag

SEQ ID NO: 2550 - RNA, 20 nt, synthetic construct
  source 1..20: mol_type = other RNA
acttttttgctggtttgaga

SEQ ID NO: 2551 - RNA, 20 nt, synthetic construct
  source 1..20: mol_type = other RNA
accaaaatgctgcaaccaga

SEQ ID NO: 2552 - RNA, 20 nt, synthetic construct
  source 1..20: mol_type = other RNA
ggcttgaggagatggggtct

SEQ ID NO: 2553 - RNA, 20 nt, synthetic construct
  source 1..20: mol_type = other RNA
ctctatctccattttgaaac

SEQ ID NO: 2554 - RNA, 20 nt, synthetic construct
  source 1..20: mol_type = other RNA
aaatggagatagagagaaat

SEQ ID NO: 2555 - RNA, 20 nt, synthetic construct
  source 1..20: mol_type = other RNA
aaacacagagtggtttcaaa

SEQ ID NO: 2556 - RNA, 20 nt, synthetic construct
  source 1..20: mol_type = other RNA
tccaaacacagagtggtttc

SEQ ID NO: 2557 - RNA, 20 nt, synthetic construct
  source 1..20: mol_type = other RNA
gagctgcccactggcagaac

SEQ ID NO: 2558 - RNA, 20 nt, synthetic construct
  source 1..20: mol_type = other RNA
gccagtgggcagctctgaat

SEQ ID NO: 2559 - RNA, 20 nt, synthetic construct
  source 1..20: mol_type = other RNA
ttgggcaggagtgagctcct

SEQ ID NO: 2560 - RNA, 20 nt, synthetic construct
  source 1..20: mol_type = other RNA
ggggacaaggagctcactcc

SEQ ID NO: 2561 - RNA, 20 nt, synthetic construct
  source 1..20: mol_type = other RNA
atactctggttctgccactt

SEQ ID NO: 2562 - RNA, 20 nt, synthetic construct
  source 1..20: mol_type = other RNA
gccacttccatgccctttga

SEQ ID NO: 2563 - RNA, 20 nt, synthetic construct
  source 1..20: mol_type = other RNA
atgccctttgagcctgggca

SEQ ID NO: 2564 - RNA, 20 nt, synthetic construct
  source 1..20: mol_type = other RNA
cctcatctcagcttcctcct

SEQ ID NO: 2565 - RNA, 20 nt, synthetic construct
  source 1..20: mol_type = other RNA
tcctccataagagggaaaaa

SEQ ID NO: 2566 - RNA, 20 nt, synthetic construct
  source 1..20: mol_type = other RNA
ctcttatggaggaggaagct

SEQ ID NO: 2567 - RNA, 20 nt, synthetic construct
  source 1..20: mol_type = other RNA
gccccagccgggggcctctc

SEQ ID NO: 2568 - RNA, 20 nt, synthetic construct
  source 1..20: mol_type = other RNA
aaccgaggtctgccctcctt

SEQ ID NO: 2569 - RNA, 20 nt, synthetic construct
  source 1..20: mol_type = other RNA
ccctgccgctctatagctgt

SEQ ID NO: 2570 - RNA, 20 nt, synthetic construct
  source 1..20: mol_type = other RNA
tcatacagagatgttaagta

SEQ ID NO: 2571 - RNA, 20 nt, synthetic construct
  source 1..20: mol_type = other RNA
agctatcgttactattgttt

SEQ ID NO: 2572 - RNA, 20 nt, synthetic construct
  source 1..20: mol_type = other RNA
tcacccgttgctttaaaatc

SEQ ID NO: 2573 - RNA, 20 nt, synthetic construct
  source 1..20: mol_type = other RNA
acacagggtagcccgtcaat

SEQ ID NO: 2574 - RNA, 20 nt, synthetic construct
  source 1..20: mol_type = other RNA
tgctacctgcctgggcatgt

SEQ ID NO: 2575 - RNA, 20 nt, synthetic construct
  source 1..20: mol_type = other RNA
ggttgggtggagcatgagag

SEQ ID NO: 2576 - RNA, 20 nt, synthetic construct
  source 1..20: mol_type = other RNA
cagacctctcatgctccacc

SEQ ID NO: 2577 - RNA, 20 nt, synthetic construct
  source 1..20: mol_type = other RNA
aggctggagtcccactgtct

SEQ ID NO: 2578 - RNA, 20 nt, synthetic construct
  source 1..20: mol_type = other RNA
cgtctgagcacgtccagggg

SEQ ID NO: 2579 - RNA, 20 nt, synthetic construct
  source 1..20: mol_type = other RNA
cctggacgtgctcagacgag

SEQ ID NO: 2580 - RNA, 20 nt, synthetic construct
  source 1..20: mol_type = other RNA
caaaccctcagtggttcccc

SEQ ID NO: 2581 - RNA, 20 nt, synthetic construct
  source 1..20: mol_type = other RNA
caccctcactctcctgttcc

SEQ ID NO: 2582 - RNA, 20 nt, synthetic construct
  source 1..20: mol_type = other RNA
gggcacagcaggctggcatg

SEQ ID NO: 2583 - RNA, 20 nt, synthetic construct
  source 1..20: mol_type = other RNA
ggaaagatgagcatagtcag

SEQ ID NO: 2584 - RNA, 20 nt, synthetic construct
  source 1..20: mol_type = other RNA
tgaacatccatcctacatgc

SEQ ID NO: 2585 - RNA, 20 nt, synthetic construct
  source 1..20: mol_type = other RNA
ggggtcctggcttggaggga

SEQ ID NO: 2586 - RNA, 20 nt, synthetic construct
  source 1..20: mol_type = other RNA
ctccaagccaggacccctga

SEQ ID NO: 2587 - RNA, 20 nt, synthetic construct
  source 1..20: mol_type = other RNA
aaaggggagcgtgattagag

SEQ ID NO: 2588 - RNA, 20 nt, synthetic construct
  source 1..20: mol_type = other RNA
aactgacatgtgcctgtgag

SEQ ID NO: 2589 - RNA, 20 nt, synthetic construct
  source 1..20: mol_type = other RNA
atgacttcaaactgacatgt

SEQ ID NO: 2590 - RNA, 20 nt, synthetic construct
  source 1..20: mol_type = other RNA
tggagtcagattccatgact

SEQ ID NO: 2591 - RNA, 20 nt, synthetic construct
  source 1..20: mol_type = other RNA
cttagctgcaaaatggtgct

SEQ ID NO: 2592 - RNA, 20 nt, synthetic construct
  source 1..20: mol_type = other RNA
ctatgtcctagctgcaaggg

SEQ ID NO: 2593 - RNA, 20 nt, synthetic construct
  source 1..20: mol_type = other RNA
gagcacatgccaggctccat

SEQ ID NO: 2594 - RNA, 20 nt, synthetic construct
  source 1..20: mol_type = other RNA
cacgtgtcatcttcacagtg

SEQ ID NO: 2595 - RNA, 20 nt, synthetic construct
  source 1..20: mol_type = other RNA
cagtgtccctgtgagtaggt

SEQ ID NO: 2596 - RNA, 20 nt, synthetic construct
  source 1..20: mol_type = other RNA
ctttccatcttacaaatgag

SEQ ID NO: 2597 - RNA, 20 nt, synthetic construct
  source 1..20: mol_type = other RNA
atcttacaaatgagtaaaca

SEQ ID NO: 2598 - RNA, 20 nt, synthetic construct
  source 1..20: mol_type = other RNA
tagccaatgggtgtgtctga

SEQ ID NO: 2599 - RNA, 20 nt, synthetic construct
  source 1..20: mol_type = other RNA
gaggtggttcagacagaccc

SEQ ID NO: 2600 - RNA, 20 nt, synthetic construct
  source 1..20: mol_type = other RNA
gacagaccccggcttaccct

SEQ ID NO: 2601 - RNA, 20 nt, synthetic construct
  source 1..20: mol_type = other RNA
agggtaagccggggtctgtc

SEQ ID NO: 2602 - RNA, 20 nt, synthetic construct
  source 1..20: mol_type = other RNA
gcctgctggctgcataggga

SEQ ID NO: 2603 - RNA, 20 nt, synthetic construct
  source 1..20: mol_type = other RNA
acccagagatggagacagtg

SEQ ID NO: 2604 - RNA, 20 nt, synthetic construct
  source 1..20: mol_type = other RNA
ctgagaaactaaggctcaga

SEQ ID NO: 2605 - RNA, 20 nt, synthetic construct
  source 1..20: mol_type = other RNA
cagggaaaacaccatctttc

SEQ ID NO: 2606 - RNA, 20 nt, synthetic construct
  source 1..20: mol_type = other RNA
acctctctgagccttagttt

SEQ ID NO: 2607 - RNA, 20 nt, synthetic construct
  source 1..20: mol_type = other RNA
caactctgcagctgaccagc

SEQ ID NO: 2608 - RNA, 20 nt, synthetic construct
  source 1..20: mol_type = other RNA
ttgagttgtttctaggtttc

SEQ ID NO: 2609 - RNA, 20 nt, synthetic construct
  source 1..20: mol_type = other RNA
aggtttcctagctcttgcct

SEQ ID NO: 2610 - RNA, 20 nt, synthetic construct
  source 1..20: mol_type = other RNA
tagctcttgcctcagacctt

SEQ ID NO: 2611 - RNA, 20 nt, synthetic construct
  source 1..20: mol_type = other RNA
gtgtcagtttgtgccaccac

SEQ ID NO: 2612 - RNA, 20 nt, synthetic construct
  source 1..20: mol_type = other RNA
gccattgtgtggacagcatg

SEQ ID NO: 2613 - RNA, 20 nt, synthetic construct
  source 1..20: mol_type = other RNA
actccaagtggagtggggta

SEQ ID NO: 2614 - RNA, 20 nt, synthetic construct
  source 1..20: mol_type = other RNA
ttatgccatatttatgcaca

SEQ ID NO: 2615 - RNA, 20 nt, synthetic construct
  source 1..20: mol_type = other RNA
gagatggggtcttgctgtgt

SEQ ID NO: 2616 - RNA, 20 nt, synthetic construct
  source 1..20: mol_type = other RNA
tgggctcaagcaatcctctg

SEQ ID NO: 2617 - RNA, 20 nt, synthetic construct
  source 1..20: mol_type = other RNA
gcatgcagctcaggcacccc

SEQ ID NO: 2618 - RNA, 20 nt, synthetic construct
  source 1..20: mol_type = other RNA
tgccttgctggtcatgctaa

SEQ ID NO: 2619 - RNA, 20 nt, synthetic construct
  source 1..20: mol_type = other RNA
agggcttggcacatgccttg

SEQ ID NO: 2620 - RNA, 20 nt, synthetic construct
  source 1..20: mol_type = other RNA
agaaacctgagtgtataact

SEQ ID NO: 2621 - RNA, 20 nt, synthetic construct
  source 1..20: mol_type = other RNA
agaaggcccggctgtcacat

SEQ ID NO: 2622 - RNA, 20 nt, synthetic construct
  source 1..20: mol_type = other RNA
tttaagagtggactccttag

SEQ ID NO: 2623 - RNA, 20 nt, synthetic construct
  source 1..20: mol_type = other RNA
ggtctggatggtgcattcct

SEQ ID NO: 2624 - RNA, 20 nt, synthetic construct
  source 1..20: mol_type = other RNA
tcgagagcaaaagacagtct

SEQ ID NO: 2625 - RNA, 20 nt, synthetic construct
  source 1..20: mol_type = other RNA
aggtgctcttcctggcactg

SEQ ID NO: 2626 - RNA, 20 nt, synthetic construct
  source 1..20: mol_type = other RNA
tggcactggggagggataca

SEQ ID NO: 2627 - RNA, 20 nt, synthetic construct
  source 1..20: mol_type = other RNA
ccctcctggagcatctattt

SEQ ID NO: 2628 - RNA, 20 nt, synthetic construct
  source 1..20: mol_type = other RNA
tccactaaaatagatgctcc

SEQ ID NO: 2629 - RNA, 20 nt, synthetic construct
  source 1..20: mol_type = other RNA
gtcttcctccactaaaatag

SEQ ID NO: 2630 - RNA, 20 nt, synthetic construct
  source 1..20: mol_type = other RNA
gtactctatattaatggttt

SEQ ID NO: 2631 - RNA, 20 nt, synthetic construct
  source 1..20: mol_type = other RNA
ccatcgcatcttttcagtac

SEQ ID NO: 2632 - RNA, 20 nt, synthetic construct
  source 1..20: mol_type = other RNA
ttgctatagttttctccatc

SEQ ID NO: 2633 - RNA, 20 nt, synthetic construct
  source 1..20: mol_type = other RNA
cttccttgctatagttttct

SEQ ID NO: 2634 - RNA, 20 nt, synthetic construct
  source 1..20: mol_type = other RNA
tccaccttgtcagcgagacc

SEQ ID NO: 2635 - RNA, 20 nt, synthetic construct
  source 1..20: mol_type = other RNA
ctgcctcatggcctgtttcg

SEQ ID NO: 2636 - RNA, 20 nt, synthetic construct
  source 1..20: mol_type = other RNA
aggcaaagcaaaggccccca

SEQ ID NO: 2637 - RNA, 20 nt, synthetic construct
  source 1..20: mol_type = other RNA
tggtactccctgcacatccc

SEQ ID NO: 2638 - RNA, 20 nt, synthetic construct
  source 1..20: mol_type = other RNA
cacctctctggtttcctggt

SEQ ID NO: 2639 - RNA, 20 nt, synthetic construct
  source 1..20: mol_type = other RNA
gatccaggccagaccacact

SEQ ID NO: 2640 - RNA, 20 nt, synthetic construct
  source 1..20: mol_type = other RNA
cagctcagcagctaggccac

SEQ ID NO: 2641 - RNA, 20 nt, synthetic construct
  source 1..20: mol_type = other RNA
gcccaaggtccttgtcatct

SEQ ID NO: 2642 - RNA, 20 nt, synthetic construct
  source 1..20: mol_type = other RNA
gactccagcctgagccccgc

SEQ ID NO: 2643 - RNA, 20 nt, synthetic construct
  source 1..20: mol_type = other RNA
gagggatgagtttggcactg

SEQ ID NO: 2644 - RNA, 20 nt, synthetic construct
  source 1..20: mol_type = other RNA
tgcctggtttgagggccgtg

SEQ ID NO: 2645 - RNA, 20 nt, synthetic construct
  source 1..20: mol_type = other RNA
gcaccatggctgaccaaaca

SEQ ID NO: 2646 - RNA, 20 nt, synthetic construct
  source 1..20: mol_type = other RNA
gtgaggccaaagtgcagacg

SEQ ID NO: 2647 - RNA, 20 nt, synthetic construct
  source 1..20: mol_type = other RNA
ccctccgacatccttctgtg

SEQ ID NO: 2648 - RNA, 20 nt, synthetic construct
  source 1..20: mol_type = other RNA
tttctccctccgacatcctt

SEQ ID NO: 2649 - RNA, 20 nt, synthetic construct
  source 1..20: mol_type = other RNA
cacccctacttcacagagga

SEQ ID NO: 2650 - RNA, 20 nt, synthetic construct
  source 1..20: mol_type = other RNA
gggttttgtagcatttttat

SEQ ID NO: 2651 - RNA, 20 nt, synthetic construct
  source 1..20: mol_type = other RNA
tagtataagcaaggcatcac

SEQ ID NO: 2652 - RNA, 20 nt, synthetic construct
  source 1..20: mol_type = other RNA
acaaacttacccagttccta

SEQ ID NO: 2653 - RNA, 20 nt, synthetic construct
  source 1..20: mol_type = other RNA
catcaccagtacttgcccaa

SEQ ID NO: 2654 - RNA, 20 nt, synthetic construct
  source 1..20: mol_type = other RNA
taggataggcacaaggagta

SEQ ID NO: 2655 - RNA, 20 nt, synthetic construct
  source 1..20: mol_type = other RNA
ttcctaggataggcacaagg

SEQ ID NO: 2656 - RNA, 20 nt, synthetic construct
  source 1..20: mol_type = other RNA
tttcattcctaggataggca

SEQ ID NO: 2657 - RNA, 20 nt, synthetic construct
  source 1..20: mol_type = other RNA
tgcagctcccctgaccaccc

SEQ ID NO: 2658 - RNA, 20 nt, synthetic construct
  source 1..20: mol_type = other RNA
ttcttttctccccagtacct

SEQ ID NO: 2659 - RNA, 20 nt, synthetic construct
  source 1..20: mol_type = other RNA
tttctccccagtacctggca

SEQ ID NO: 2660 - RNA, 20 nt, synthetic construct
  source 1..20: mol_type = other RNA
ccccagtacctggcacacag

SEQ ID NO: 2661 - RNA, 20 nt, synthetic construct
  source 1..20: mol_type = other RNA
gtaaatactcgggccaggct

SEQ ID NO: 2662 - RNA, 20 nt, synthetic construct
  source 1..20: mol_type = other RNA
gtaatgagccagtgctaagt

SEQ ID NO: 2663 - RNA, 20 nt, synthetic construct
  source 1..20: mol_type = other RNA
tgatttaaaattcagaacag

SEQ ID NO: 2664 - RNA, 20 nt, synthetic construct
  source 1..20: mol_type = other RNA
gaacagtctcagattgggtg

SEQ ID NO: 2665 - RNA, 20 nt, synthetic construct
  source 1..20: mol_type = other RNA
gaattttaaatcatgaaaaa

SEQ ID NO: 2666 - RNA, 20 nt, synthetic construct
  source 1..20: mol_type = other RNA
taaacacaagcaatcctcct

SEQ ID NO: 2667 - RNA, 20 nt, synthetic construct
  source 1..20: mol_type = other RNA
agaccctgggcaacagtgag

SEQ ID NO: 2668 - RNA, 20 nt, synthetic construct
  source 1..20: mol_type = other RNA
atgtgggacctccaggccct

SEQ ID NO: 2669 - RNA, 20 nt, synthetic construct
  source 1..20: mol_type = other RNA
ccagccttagagtggagggc

SEQ ID NO: 2670 - RNA, 20 nt, synthetic construct
  source 1..20: mol_type = other RNA
ctctctctctagacagccca

SEQ ID NO: 2671 - RNA, 20 nt, synthetic construct
  source 1..20: mol_type = other RNA
ttatgacatgggctgtctag

SEQ ID NO: 2672 - RNA, 20 nt, synthetic construct
  source 1..20: mol_type = other RNA
tcccagattacattttctga

SEQ ID NO: 2673 - RNA, 20 nt, synthetic construct
  source 1..20: mol_type = other RNA
gacaattcagtgtcatatat

SEQ ID NO: 2674 - RNA, 20 nt, synthetic construct
  source 1..20: mol_type = other RNA
gtgtcatatatggaaagcat

SEQ ID NO: 2675 - RNA, 20 nt, synthetic construct
  source 1..20: mol_type = other RNA
atatatgacactgaattgtc

SEQ ID NO: 2676 - RNA, 20 nt, synthetic construct
  source 1..20: mol_type = other RNA
agagttgacagatggcaatg

SEQ ID NO: 2677 - RNA, 20 nt, synthetic construct
  source 1..20: mol_type = other RNA
agccattgccatctgtcaac

SEQ ID NO: 2678 - RNA, 20 nt, synthetic construct
  source 1..20: mol_type = other RNA
aacgggcagagataacacag

SEQ ID NO: 2679 - RNA, 20 nt, synthetic construct
  source 1..20: mol_type = other RNA
cctccacagaatcaagtatc

SEQ ID NO: 2680 - RNA, 20 nt, synthetic construct
  source 1..20: mol_type = other RNA
gtggaggggaaggagagaga

SEQ ID NO: 2681 - RNA, 20 nt, synthetic construct
  source 1..20: mol_type = other RNA
aacatcacagagctgtcagg

SEQ ID NO: 2682 - RNA, 20 nt, synthetic construct
  source 1..20: mol_type = other RNA
tgcagagggttagcaggtgg

SEQ ID NO: 2683 - RNA, 20 nt, synthetic construct
  source 1..20: mol_type = other RNA
tccccgatccctggtgacca

SEQ ID NO: 2684 - RNA, 20 nt, synthetic construct
  source 1..20: mol_type = other RNA
tgcaagccacaccccttcct

SEQ ID NO: 2685 - RNA, 20 nt, synthetic construct
  source 1..20: mol_type = other RNA
ccttcctgcaagccacaccc

SEQ ID NO: 2686 - RNA, 20 nt, synthetic construct
  source 1..20: mol_type = other RNA
ctatttgctagtccagattt

SEQ ID NO: 2687 - RNA, 20 nt, synthetic construct
  source 1..20: mol_type = other RNA
tagtggccagcgttgctcac

SEQ ID NO: 2688 - RNA, 20 nt, synthetic construct
  source 1..20: mol_type = other RNA
tgctagatcccacaggtctc

SEQ ID NO: 2689 - RNA, 20 nt, synthetic construct
  source 1..20: mol_type = other RNA
tctccaccaaagcttttggc

SEQ ID NO: 2690 - RNA, 20 nt, synthetic construct
  source 1..20: mol_type = other RNA
gcatcctcctctaagctttg

SEQ ID NO: 2691 - RNA, 20 nt, synthetic construct
  source 1..20: mol_type = other RNA
tctgcaaagcttagaggagg

SEQ ID NO: 2692 - RNA, 20 nt, synthetic construct
  source 1..20: mol_type = other RNA
ggattcatctgcaaagctta

SEQ ID NO: 2693 - RNA, 20 nt, synthetic construct
  source 1..20: mol_type = other RNA
ctggaggggctgaccatttc

SEQ ID NO: 2694 - RNA, 20 nt, synthetic construct
  source 1..20: mol_type = other RNA
tttctctggaggggctgacc

SEQ ID NO: 2695 - RNA, 20 nt, synthetic construct
  source 1..20: mol_type = other RNA
tcttagtactttacactaat

SEQ ID NO: 2696 - RNA, 20 nt, synthetic construct
  source 1..20: mol_type = other RNA
cccgcccactacggctgtgt

SEQ ID NO: 2697 - RNA, 20 nt, synthetic construct
  source 1..20: mol_type = other RNA
gatatatgaagaatggcggc

SEQ ID NO: 2698 - RNA, 20 nt, synthetic construct
  source 1..20: mol_type = other RNA
tatatcagaacacagccgta

SEQ ID NO: 2699 - RNA, 20 nt, synthetic construct
  source 1..20: mol_type = other RNA
tcatatatcagaacacagcc

SEQ ID NO: 2700 - RNA, 20 nt, synthetic construct
  source 1..20: mol_type = other RNA
aaaacagagttggagtcttg

SEQ ID NO: 2701 - RNA, 20 nt, synthetic construct
  source 1..20: mol_type = other RNA
aagagtataaaataaatttt

SEQ ID NO: 2702 - RNA, 20 nt, synthetic construct
  source 1..20: mol_type = other RNA
tagcttctaagagtataaaa

SEQ ID NO: 2703 - RNA, 20 nt, synthetic construct
  source 1..20: mol_type = other RNA
tgtgtggcaaagttcttagc

SEQ ID NO: 2704 - RNA, 20 nt, synthetic construct
  source 1..20: mol_type = other RNA
aaatttggttcatgtgtggc

SEQ ID NO: 2705 - RNA, 20 nt, synthetic construct
  source 1..20: mol_type = other RNA
tccctagtgtatctacttcc

SEQ ID NO: 2706 - RNA, 20 nt, synthetic construct
  source 1..20: mol_type = other RNA
ctagtgtatctacttccttt

SEQ ID NO: 2707 - RNA, 20 nt, synthetic construct
  source 1..20: mol_type = other RNA
ttttgaaattttataaacaa

SEQ ID NO: 2708 - RNA, 20 nt, synthetic construct
  source 1..20: mol_type = other RNA
aaaggaagtagatacactag

SEQ ID NO: 2709 - RNA, 20 nt, synthetic construct
  source 1..20: mol_type = other RNA
tctgctacctcttgtgtata

SEQ ID NO: 2710 - RNA, 20 nt, synthetic construct
  source 1..20: mol_type = other RNA
agtctgcttgttccaagctc

SEQ ID NO: 2711 - RNA, 20 nt, synthetic construct
  source 1..20: mol_type = other RNA
aagctcagaaggtaactgca

SEQ ID NO: 2712 - RNA, 20 nt, synthetic construct
  source 1..20: mol_type = other RNA
gagcttggaacaagcagact

SEQ ID NO: 2713 - RNA, 20 nt, synthetic construct
  source 1..20: mol_type = other RNA
ctgctaacatcgaggtgtgt

SEQ ID NO: 2714 - RNA, 20 nt, synthetic construct
  source 1..20: mol_type = other RNA
taaaactgactgtagttgtc

SEQ ID NO: 2715 - RNA, 20 nt, synthetic construct
  source 1..20: mol_type = other RNA
cctggagtcctcacacggtc

SEQ ID NO: 2716 - RNA, 20 nt, synthetic construct
  source 1..20: mol_type = other RNA
ttcccaggatgccttcaacg

SEQ ID NO: 2717 - RNA, 20 nt, synthetic construct
  source 1..20: mol_type = other RNA
caggatgccttcaacgggca

SEQ ID NO: 2718 - RNA, 20 nt, synthetic construct
  source 1..20: mol_type = other RNA
acgggcagaatcggccatct

SEQ ID NO: 2719 - RNA, 20 nt, synthetic construct
  source 1..20: mol_type = other RNA
gcccgttgaaggcatcctgg

SEQ ID NO: 2720 - RNA, 20 nt, synthetic construct
  source 1..20: mol_type = other RNA
tgagaacacacagcattatt

SEQ ID NO: 2721 - RNA, 20 nt, synthetic construct
  source 1..20: mol_type = other RNA
caagaagctcccttagtgag

SEQ ID NO: 2722 - RNA, 20 nt, synthetic construct
  source 1..20: mol_type = other RNA
tgctctgtttgcagaccatt

SEQ ID NO: 2723 - RNA, 20 nt, synthetic construct
  source 1..20: mol_type = other RNA
aaatggtctgcaaacagagc

SEQ ID NO: 2724 - RNA, 20 nt, synthetic construct
  source 1..20: mol_type = other RNA
tccaaaaaattggcagtaaa

SEQ ID NO: 2725 - RNA, 20 nt, synthetic construct
  source 1..20: mol_type = other RNA
aaggtaagcctgtcataact

SEQ ID NO: 2726 - RNA, 20 nt, synthetic construct
  source 1..20: mol_type = other RNA
ttgactgtagctgtcagcaa

SEQ ID NO: 2727 - RNA, 20 nt, synthetic construct
  source 1..20: mol_type = other RNA
ctttgctggtaaccacttga

SEQ ID NO: 2728 - RNA, 20 nt, synthetic construct
  source 1..20: mol_type = other RNA
gatcatgttgcttatattgt

SEQ ID NO: 2729 - RNA, 20 nt, synthetic construct
  source 1..20: mol_type = other RNA
tcaggatcgtccaccgtgta

SEQ ID NO: 2730 - RNA, 20 nt, synthetic construct
  source 1..20: mol_type = other RNA
gcacccctagcacctgccgt

SEQ ID NO: 2731 - RNA, 20 nt, synthetic construct
  source 1..20: mol_type = other RNA
ataggaaataaggggactag

SEQ ID NO: 2732 - RNA, 20 nt, synthetic construct
  source 1..20: mol_type = other RNA
tatggaaacaacgccttccg

SEQ ID NO: 2733 - RNA, 20 nt, synthetic construct
  source 1..20: mol_type = other RNA
agtccccttatttcctatgg

SEQ ID NO: 2734 - RNA, 20 nt, synthetic construct
  source 1..20: mol_type = other RNA
ctcctgattttgggctcctg

SEQ ID NO: 2735 - RNA, 20 nt, synthetic construct
  source 1..20: mol_type = other RNA
aggtcatgtcccacacaatc

SEQ ID NO: 2736 - RNA, 20 nt, synthetic construct
  source 1..20: mol_type = other RNA
ctccgcccacatcctcacca

SEQ ID NO: 2737 - RNA, 20 nt, synthetic construct
  source 1..20: mol_type = other RNA
caccttctctccgcccacat

SEQ ID NO: 2738 - RNA, 20 nt, synthetic construct
  source 1..20: mol_type = other RNA
cctaccctattctcaccttc

SEQ ID NO: 2739 - RNA, 20 nt, synthetic construct
  source 1..20: mol_type = other RNA
tgtcctactgtttcccctac

SEQ ID NO: 2740 - RNA, 20 nt, synthetic construct
  source 1..20: mol_type = other RNA
cgtactcaaaaccaatggta

SEQ ID NO: 2741 - RNA, 20 nt, synthetic construct
  source 1..20: mol_type = other RNA
accattggttttgagtacgt

SEQ ID NO: 2742 - RNA, 20 nt, synthetic construct
  source 1..20: mol_type = other RNA
aactgcaagaccattggaac

SEQ ID NO: 2743 - RNA, 20 nt, synthetic construct
  source 1..20: mol_type = other RNA
aatggtcttgcagtttgaaa

SEQ ID NO: 2744 - RNA, 20 nt, synthetic construct
  source 1..20: mol_type = other RNA
gacggttccaatggtcttgc

SEQ ID NO: 2745 - RNA, 20 nt, synthetic construct
  source 1..20: mol_type = other RNA
ctaagggtacagttctgctc

SEQ ID NO: 2746 - RNA, 20 nt, synthetic construct
  source 1..20: mol_type = other RNA
gctcttaagtgctggccctt

SEQ ID NO: 2747 - RNA, 20 nt, synthetic construct
  source 1..20: mol_type = other RNA
atcttctcagtgtgtttgac

SEQ ID NO: 2748 - RNA, 20 nt, synthetic construct
  source 1..20: mol_type = other RNA
cagtgtgtttgacaaaggcc

SEQ ID NO: 2749 - RNA, 20 nt, synthetic construct
  source 1..20: mol_type = other RNA
gtgacttgctggaggttggc

SEQ ID NO: 2750 - RNA, 20 nt, synthetic construct
  source 1..20: mol_type = other RNA
ttgttattctgtgacttgct

SEQ ID NO: 2751 - RNA, 20 nt, synthetic construct
  source 1..20: mol_type = other RNA
gtgctgtcagacttcattgt

SEQ ID NO: 2752 - RNA, 20 nt, synthetic construct
  source 1..20: mol_type = other RNA
ctggcagtgagggtttctgt

SEQ ID NO: 2753 - RNA, 20 nt, synthetic construct
  source 1..20: mol_type = other RNA
ttctctggcagtgagggttt

SEQ ID NO: 2754 - RNA, 20 nt, synthetic construct
  source 1..20: mol_type = other RNA
gggctggctgcgcctctgtg

SEQ ID NO: 2755 - RNA, 20 nt, synthetic construct
  source 1..20: mol_type = other RNA
ctgtcagatttgccaagtca

SEQ ID NO: 2756 - RNA, 20 nt, synthetic construct
  source 1..20: mol_type = other RNA
taaggctccctagttctgtg

SEQ ID NO: 2757 - RNA, 20 nt, synthetic construct
  source 1..20: mol_type = other RNA
gtgcatggtgagatgaaaat

SEQ ID NO: 2758 - RNA, 20 nt, synthetic construct
  source 1..20: mol_type = other RNA
tctcaccatgcacagaacta

SEQ ID NO: 2759 - RNA, 20 nt, synthetic construct
  source 1..20: mol_type = other RNA
gccctgttttgcctttagtt

SEQ ID NO: 2760 - RNA, 20 nt, synthetic construct
  source 1..20: mol_type = other RNA
aaatacaaaatgtacaaaat

SEQ ID NO: 2761 - RNA, 20 nt, synthetic construct
  source 1..20: mol_type = other RNA
tatatattttgtacattttg

SEQ ID NO: 2762 - RNA, 20 nt, synthetic construct
  source 1..20: mol_type = other RNA
ctcatttataccagctccct

SEQ ID NO: 2763 - RNA, 20 nt, synthetic construct
  source 1..20: mol_type = other RNA
aaagtatagcaccattcact

SEQ ID NO: 2764 - RNA, 20 nt, synthetic construct
  source 1..20: mol_type = other RNA
attgctttatatttatttct

SEQ ID NO: 2765 - RNA, 20 nt, synthetic construct
  source 1..20: mol_type = other RNA
gggaaaataaatcttaaacc

SEQ ID NO: 2766 - RNA, 20 nt, synthetic construct
  source 1..20: mol_type = other RNA
cagaaataaatataaagcaa

SEQ ID NO: 2767 - RNA, 20 nt, synthetic construct
  source 1..20: mol_type = other RNA
gtgttaattagtcatgttga

SEQ ID NO: 2768 - RNA, 20 nt, synthetic construct
  source 1..20: mol_type = other RNA
cctcaacatgactaattaac

SEQ ID NO: 2769 - RNA, 20 nt, synthetic construct
  source 1..20: mol_type = other RNA
caaattccttctctgcatta

SEQ ID NO: 2770 - RNA, 20 nt, synthetic construct
  source 1..20: mol_type = other RNA
ttctctgcattacaataact

SEQ ID NO: 2771 - RNA, 20 nt, synthetic construct
  source 1..20: mol_type = other RNA
ctgcattacaataactatga

SEQ ID NO: 2772 - RNA, 20 nt, synthetic construct
  source 1..20: mol_type = other RNA
tagttattgtaatgcagaga

SEQ ID NO: 2773 - RNA, 20 nt, synthetic construct
  source 1..20: mol_type = other RNA
tatacaaccaataccaaggg

SEQ ID NO: 2774 - RNA, 20 nt, synthetic construct
  source 1..20: mol_type = other RNA
gtaattatgttttaagcaaa

SEQ ID NO: 2775 - RNA, 20 nt, synthetic construct
  source 1..20: mol_type = other RNA
atatgtctccaagcattaaa

SEQ ID NO: 2776 - RNA, 20 nt, synthetic construct
  source 1..20: mol_type = other RNA
gtgaagttaaactcagtaaa

SEQ ID NO: 2777 - RNA, 20 nt, synthetic construct
  source 1..20: mol_type = other RNA
cagaattatctttttaatgc

SEQ ID NO: 2778 - RNA, 20 nt, synthetic construct
  source 1..20: mol_type = other RNA
ccaaacagattttaaaaaca

SEQ ID NO: 2779 - RNA, 20 nt, synthetic construct
  source 1..20: mol_type = other RNA
ttaagtaattgatgtcaaat

SEQ ID NO: 2780 - RNA, 20 nt, synthetic construct
  source 1..20: mol_type = other RNA
ggagaacacagcattttcaa

SEQ ID NO: 2781 - RNA, 20 nt, synthetic construct
  source 1..20: mol_type = other RNA
ccagaagtacagggtgcatt

SEQ ID NO: 2782 - RNA, 20 nt, synthetic construct
  source 1..20: mol_type = other RNA
aaattgctcttttcaatcta

SEQ ID NO: 2783 - RNA, 20 nt, synthetic construct
  source 1..20: mol_type = other RNA
atctaattatatcagaaaaa

SEQ ID NO: 2784 - RNA, 20 nt, synthetic construct
  source 1..20: mol_type = other RNA
gatataattagattgaaaag

SEQ ID NO: 2785 - RNA, 20 nt, synthetic construct
  source 1..20: mol_type = other RNA
agagcttagtatttcccaat

SEQ ID NO: 2786 - RNA, 20 nt, synthetic construct
  source 1..20: mol_type = other RNA
caatttttgatcctgatcct

SEQ ID NO: 2787 - RNA, 20 nt, synthetic construct
  source 1..20: mol_type = other RNA
tcaagatccaagcttatgca

SEQ ID NO: 2788 - RNA, 20 nt, synthetic construct
  source 1..20: mol_type = other RNA
catctagacccatctgaaat

SEQ ID NO: 2789 - RNA, 20 nt, synthetic construct
  source 1..20: mol_type = other RNA
gatgggtctagatgagaacc

SEQ ID NO: 2790 - RNA, 20 nt, synthetic construct
  source 1..20: mol_type = other RNA
atacaaatagggagacatat

SEQ ID NO: 2791 - RNA, 20 nt, synthetic construct
  source 1..20: mol_type = other RNA
ttgtaaaatagtaattaagt

SEQ ID NO: 2792 - RNA, 20 nt, synthetic construct
  source 1..20: mol_type = other RNA
ttttcattgtaaaatagtaa

SEQ ID NO: 2793 - RNA, 20 nt, synthetic construct
  source 1..20: mol_type = other RNA
tgtttaatattactgcaaga

SEQ ID NO: 2794 - RNA, 20 nt, synthetic construct
  source 1..20: mol_type = other RNA
taaaatataaaaaccaaagg

SEQ ID NO: 2795 - RNA, 20 nt, synthetic construct
  source 1..20: mol_type = other RNA
tttggtttttatattttaag

SEQ ID NO: 2796 - RNA, 20 nt, synthetic construct
  source 1..20: mol_type = other RNA
tttgtagcatcgtagagaaa

SEQ ID NO: 2797 - RNA, 20 nt, synthetic construct
  source 1..20: mol_type = other RNA
ctacgatgctacaaaagaaa

SEQ ID NO: 2798 - RNA, 20 nt, synthetic construct
  source 1..20: mol_type = other RNA
tgtaacaaaaaagtctgcca

SEQ ID NO: 2799 - RNA, 20 nt, synthetic construct
  source 1..20: mol_type = other RNA
gaaaatctccacagaaatgt

SEQ ID NO: 2800 - RNA, 20 nt, synthetic construct
  source 1..20: mol_type = other RNA
gaaatagagccagtggcaga

SEQ ID NO: 2801 - RNA, 20 nt, synthetic construct
  source 1..20: mol_type = other RNA
gtggagattttcggaaatag

SEQ ID NO: 2802 - RNA, 20 nt, synthetic construct
  source 1..20: mol_type = other RNA
catttctgtggagattttcg

SEQ ID NO: 2803 - RNA, 20 nt, synthetic construct
  source 1..20: mol_type = other RNA
cccactgccaaacagctccc

SEQ ID NO: 2804 - RNA, 20 nt, synthetic construct
  source 1..20: mol_type = other RNA
agtggcttaaaaatgctttc

SEQ ID NO: 2805 - RNA, 20 nt, synthetic construct
  source 1..20: mol_type = other RNA
ttgagaaatacacgatccgc

SEQ ID NO: 2806 - RNA, 20 nt, synthetic construct
  source 1..20: mol_type = other RNA
caaggaaagcatttttaagc

SEQ ID NO: 2807 - RNA, 20 nt, synthetic construct
  source 1..20: mol_type = other RNA
cagtccaatctccaggctct

SEQ ID NO: 2808 - RNA, 20 nt, synthetic construct
  source 1..20: mol_type = other RNA
aaagggttcgagattctgat

SEQ ID NO: 2809 - RNA, 20 nt, synthetic construct
  source 1..20: mol_type = other RNA
agattctgattccaagaagg

SEQ ID NO: 2810 - RNA, 20 nt, synthetic construct
  source 1..20: mol_type = other RNA
gattccaagaaggtgctgag

SEQ ID NO: 2811 - RNA, 20 nt, synthetic construct
  source 1..20: mol_type = other RNA
aagaaggtgctgagcatcca

SEQ ID NO: 2812 - RNA, 20 nt, synthetic construct
  source 1..20: mol_type = other RNA
tggaatcagaatctcgaacc

SEQ ID NO: 2813 - RNA, 20 nt, synthetic construct
  source 1..20: mol_type = other RNA
tctagggatcaacatcatca

SEQ ID NO: 2814 - RNA, 20 nt, synthetic construct
  source 1..20: mol_type = other RNA
caactcaccaatcatcatgg

SEQ ID NO: 2815 - RNA, 20 nt, synthetic construct
  source 1..20: mol_type = other RNA
gaaccctgcagaaaagaaaa

SEQ ID NO: 2816 - RNA, 20 nt, synthetic construct
  source 1..20: mol_type = other RNA
gaatctcccatgatgattgg

SEQ ID NO: 2817 - RNA, 20 nt, synthetic construct
  source 1..20: mol_type = other RNA
gcagggttcagaatctccca

SEQ ID NO: 2818 - RNA, 20 nt, synthetic construct
  source 1..20: mol_type = other RNA
tttctgcagggttcagaatc

SEQ ID NO: 2819 - RNA, 20 nt, synthetic construct
  source 1..20: mol_type = other RNA
ttttcttttctgcagggttc

SEQ ID NO: 2820 - RNA, 20 nt, synthetic construct
  source 1..20: mol_type = other RNA
tacggttagagaaaaggttt

SEQ ID NO: 2821 - RNA, 20 nt, synthetic construct
  source 1..20: mol_type = other RNA
ctaaccgtatgaactttaac

SEQ ID NO: 2822 - RNA, 20 nt, synthetic construct
  source 1..20: mol_type = other RNA
atgctgacttgtgttctgca

SEQ ID NO: 2823 - RNA, 20 nt, synthetic construct
  source 1..20: mol_type = other RNA
gcaatttaaacatgtcttca

SEQ ID NO: 2824 - RNA, 20 nt, synthetic construct
  source 1..20: mol_type = other RNA
tctggcaacttaatgcaatg

SEQ ID NO: 2825 - RNA, 20 nt, synthetic construct
  source 1..20: mol_type = other RNA
tgattatgtaaaacatgtac

SEQ ID NO: 2826 - RNA, 20 nt, synthetic construct
  source 1..20: mol_type = other RNA
atgatctcatttagtcagtg

SEQ ID NO: 2827 - RNA, 20 nt, synthetic construct
  source 1..20: mol_type = other RNA
ctgactaaatgagatcatag

SEQ ID NO: 2828 - RNA, 20 nt, synthetic construct
  source 1..20: mol_type = other RNA
cacatgggtgcagagtagca

SEQ ID NO: 2829 - RNA, 20 nt, synthetic construct
  source 1..20: mol_type = other RNA
cgttgggcactgtgtgagcc

SEQ ID NO: 2830 - RNA, 20 nt, synthetic construct
  source 1..20: mol_type = other RNA
gacccaggagtgacccagag

SEQ ID NO: 2831 - RNA, 20 nt, synthetic construct
  source 1..20: mol_type = other RNA
ccaagtgtgtaagccaaagg

SEQ ID NO: 2832 - RNA, 20 nt, synthetic construct
  source 1..20: mol_type = other RNA
gaatactcaccgtgtgccat

SEQ ID NO: 2833 - RNA, 20 nt, synthetic construct
  source 1..20: mol_type = other RNA
gaacgattcgccaagtgtgt

SEQ ID NO: 2834 - RNA, 20 nt, synthetic construct
  source 1..20: mol_type = other RNA
acctcagggcccccctactc

SEQ ID NO: 2835 - RNA, 20 nt, synthetic construct
  source 1..20: mol_type = other RNA
ttccacctcagggcccccct

SEQ ID NO: 2836 - RNA, 20 nt, synthetic construct
  source 1..20: mol_type = other RNA
gaaaatgggccaggcacagt

SEQ ID NO: 2837 - RNA, 20 nt, synthetic construct
  source 1..20: mol_type = other RNA
gaattttatttatcaaatgt

SEQ ID NO: 2838 - RNA, 20 nt, synthetic construct
  source 1..20: mol_type = other RNA
ccttgcctcagcctcccaag

SEQ ID NO: 2839 - RNA, 20 nt, synthetic construct
  source 1..20: mol_type = other RNA
agcgattctccttgcctcag

SEQ ID NO: 2840 - RNA, 20 nt, synthetic construct
  source 1..20: mol_type = other RNA
cccaggttccagcgattctc

SEQ ID NO: 2841 - RNA, 20 nt, synthetic construct
  source 1..20: mol_type = other RNA
gatttttttttttttttttt

SEQ ID NO: 2842 - RNA, 20 nt, synthetic construct
  source 1..20: mol_type = other RNA
ggcttttctcctcatacaaa

SEQ ID NO: 2843 - RNA, 20 nt, synthetic construct
  source 1..20: mol_type = other RNA
cctcatacaaagcctttgaa

SEQ ID NO: 2844 - RNA, 20 nt, synthetic construct
  source 1..20: mol_type = other RNA
aaggctttgtatgaggagaa

SEQ ID NO: 2845 - RNA, 20 nt, synthetic construct
  source 1..20: mol_type = other RNA
tgcactaaaacctttcaaag

SEQ ID NO: 2846 - RNA, 20 nt, synthetic construct
  source 1..20: mol_type = other RNA
ctctggttcatgcactaaaa

SEQ ID NO: 2847 - RNA, 20 nt, synthetic construct
  source 1..20: mol_type = other RNA
aagggagctgtccgggatga

SEQ ID NO: 2848 - RNA, 20 nt, synthetic construct
  source 1..20: mol_type = other RNA
ttatctcacacacagcaccc

SEQ ID NO: 2849 - RNA, 20 nt, synthetic construct
  source 1..20: mol_type = other RNA
ccacttggcataccttaaag

SEQ ID NO: 2850 - RNA, 20 nt, synthetic construct
  source 1..20: mol_type = other RNA
tgacgttctccacttggcat

SEQ ID NO: 2851 - RNA, 20 nt, synthetic construct
  source 1..20: mol_type = other RNA
tgttcagaaatccaaggtgg

SEQ ID NO: 2852 - RNA, 20 nt, synthetic construct
  source 1..20: mol_type = other RNA
gaaatccaaggtgggtgcgg

SEQ ID NO: 2853 - RNA, 20 nt, synthetic construct
  source 1..20: mol_type = other RNA
gaacatgaacatccagctct

SEQ ID NO: 2854 - RNA, 20 nt, synthetic construct
  source 1..20: mol_type = other RNA
ctccgcacccaccttggatt

SEQ ID NO: 2855 - RNA, 20 nt, synthetic construct
  source 1..20: mol_type = other RNA
ggaccaccagtaaaggtttg

SEQ ID NO: 2856 - RNA, 20 nt, synthetic construct
  source 1..20: mol_type = other RNA
tagtactgcctcttctggac

SEQ ID NO: 2857 - RNA, 20 nt, synthetic construct
  source 1..20: mol_type = other RNA
ctgtctccttcctagtactg

SEQ ID NO: 2858 - RNA, 20 nt, synthetic construct
  source 1..20: mol_type = other RNA
ttctctgtctccttcctagt

SEQ ID NO: 2859 - RNA, 20 nt, synthetic construct
  source 1..20: mol_type = other RNA
ggctgttccttctctgtctc

SEQ ID NO: 2860 - RNA, 20 nt, synthetic construct
  source 1..20: mol_type = other RNA
tcaaacccttctggctgttc

SEQ ID NO: 2861 - RNA, 20 nt, synthetic construct
  source 1..20: mol_type = other RNA
ctctcgtagttttcctcaaa

SEQ ID NO: 2862 - RNA, 20 nt, synthetic construct
  source 1..20: mol_type = other RNA
tgacacttctctctcgtagt

SEQ ID NO: 2863 - RNA, 20 nt, synthetic construct
  source 1..20: mol_type = other RNA
agggctttcctgacacttct

SEQ ID NO: 2864 - RNA, 20 nt, synthetic construct
  source 1..20: mol_type = other RNA
aacgggaagagcgccaggag

SEQ ID NO: 2865 - RNA, 20 nt, synthetic construct
  source 1..20: mol_type = other RNA
cgtttgaaacactattccag

SEQ ID NO: 2866 - RNA, 20 nt, synthetic construct
  source 1..20: mol_type = other RNA
ggcctcatcttagccgactg

SEQ ID NO: 2867 - RNA, 20 nt, synthetic construct
  source 1..20: mol_type = other RNA
ctccaactcagcagttgggg

SEQ ID NO: 2868 - RNA, 20 nt, synthetic construct
  source 1..20: mol_type = other RNA
ctgctaactccctcttctct

SEQ ID NO: 2869 - RNA, 20 nt, synthetic construct
  source 1..20: mol_type = other RNA
gcctcttccctgctaactcc

SEQ ID NO: 2870 - RNA, 20 nt, synthetic construct
  source 1..20: mol_type = other RNA
tatctctcactcgctcttca

SEQ ID NO: 2871 - RNA, 20 nt, synthetic construct
  source 1..20: mol_type = other RNA
ccattttcttatctctcact

SEQ ID NO: 2872 - RNA, 20 nt, synthetic construct
  source 1..20: mol_type = other RNA
ctaaacttaactttccccat

SEQ ID NO: 2873 - RNA, 20 nt, synthetic construct
  source 1..20: mol_type = other RNA
actaattctctaaacttaac

SEQ ID NO: 2874 - RNA, 20 nt, synthetic construct
  source 1..20: mol_type = other RNA
ttgcagccaaacttcgacta

SEQ ID NO: 2875 - RNA, 20 nt, synthetic construct
  source 1..20: mol_type = other RNA
cttctttgcagccaaacttc

SEQ ID NO: 2876 - RNA, 20 nt, synthetic construct
  source 1..20: mol_type = other RNA
tttctcttctttgcagccaa

SEQ ID NO: 2877 - RNA, 20 nt, synthetic construct
  source 1..20: mol_type = other RNA
ccctgttgcccctgccttct

SEQ ID NO: 2878 - RNA, 20 nt, synthetic construct
  source 1..20: mol_type = other RNA
gccctgtcaaagcctctctt

SEQ ID NO: 2879 - RNA, 20 nt, synthetic construct
  source 1..20: mol_type = other RNA
gccctgtcaaagcctctctt

SEQ ID NO: 2880 - RNA, 20 nt, synthetic construct
  source 1..20: mol_type = other RNA
cttctgccctgtcaaagcct

SEQ ID NO: 2881 - RNA, 20 nt, synthetic construct
  source 1..20: mol_type = other RNA
cagcgacgtctcagcacact

SEQ ID NO: 2882 - RNA, 20 nt, synthetic construct
  source 1..20: mol_type = other RNA
ggatattgaagagttacata

SEQ ID NO: 2883 - RNA, 20 nt, synthetic construct
  source 1..20: mol_type = other RNA
atatccagaacgctccaccc

SEQ ID NO: 2884 - RNA, 20 nt, synthetic construct
  source 1..20: mol_type = other RNA
aatgtgtatgtaactcttca

SEQ ID NO: 2885 - RNA, 20 nt, synthetic construct
  source 1..20: mol_type = other RNA
cactgtcacaggagaggaga

SEQ ID NO: 2886 - RNA, 20 nt, synthetic construct
  source 1..20: mol_type = other RNA
tgtctcctctcctgtgacag

SEQ ID NO: 2887 - RNA, 20 nt, synthetic construct
  source 1..20: mol_type = other RNA
caagcatctgcactgttctt

SEQ ID NO: 2888 - RNA, 20 nt, synthetic construct
  source 1..20: mol_type = other RNA
ctgcaaatgaagtaggtgat

SEQ ID NO: 2889 - RNA, 20 nt, synthetic construct
  source 1..20: mol_type = other RNA
tttgcagagaaaataaaagc

SEQ ID NO: 2890 - RNA, 20 nt, synthetic construct
  source 1..20: mol_type = other RNA
gtaaaatcagggtgacagct

SEQ ID NO: 2891 - RNA, 20 nt, synthetic construct
  source 1..20: mol_type = other RNA
gatcctcataagcactatgt

SEQ ID NO: 2892 - RNA, 20 nt, synthetic construct
  source 1..20: mol_type = other RNA
tttaatggggcctattctgt

SEQ ID NO: 2893 - RNA, 20 nt, synthetic construct
  source 1..20: mol_type = other RNA
gtaccaagtactgtgaaggg

SEQ ID NO: 2894 - RNA, 20 nt, synthetic construct
  source 1..20: mol_type = other RNA
cagtacttggtacagaatag

SEQ ID NO: 2895 - RNA, 20 nt, synthetic construct
  source 1..20: mol_type = other RNA
ttaacagcagtctcctctgt

SEQ ID NO: 2896 - RNA, 20 nt, synthetic construct
  source 1..20: mol_type = other RNA
aatagtctgtaactttcctt

SEQ ID NO: 2897 - RNA, 20 nt, synthetic construct
  source 1..20: mol_type = other RNA
gtgtttgcacacagtgggtg

SEQ ID NO: 2898 - RNA, 20 nt, synthetic construct
  source 1..20: mol_type = other RNA
atacatatttattttctttt

SEQ ID NO: 2899 - RNA, 20 nt, synthetic construct
  source 1..20: mol_type = other RNA
ttttctactataatgattgg

SEQ ID NO: 2900 - RNA, 20 nt, synthetic construct
  source 1..20: mol_type = other RNA
actataatgattggtattaa

SEQ ID NO: 2901 - RNA, 20 nt, synthetic construct
  source 1..20: mol_type = other RNA
ttttttaaaaatacatgtca

SEQ ID NO: 2902 - RNA, 20 nt, synthetic construct
  source 1..20: mol_type = other RNA
tggactcccctggcaagcag

SEQ ID NO: 2903 - RNA, 20 nt, synthetic construct
  source 1..20: mol_type = other RNA
agagcacgggagcttttctt

SEQ ID NO: 2904 - RNA, 20 nt, synthetic construct
  source 1..20: mol_type = other RNA
ttcaagagtccacatttcca

SEQ ID NO: 2905 - RNA, 20 nt, synthetic construct
  source 1..20: mol_type = other RNA
agagtccacatttccaggaa

SEQ ID NO: 2906 - RNA, 20 nt, synthetic construct
  source 1..20: mol_type = other RNA
aggaaggctggtgagagcaa

SEQ ID NO: 2907 - RNA, 20 nt, synthetic construct
  source 1..20: mol_type = other RNA
tggaaatgtggactcttgaa

SEQ ID NO: 2908 - RNA, 20 nt, synthetic construct
  source 1..20: mol_type = other RNA
gtaacctggcaaggcagaat

SEQ ID NO: 2909 - RNA, 20 nt, synthetic construct
  source 1..20: mol_type = other RNA
gccttgccaggttactgaaa

SEQ ID NO: 2910 - RNA, 20 nt, synthetic construct
  source 1..20: mol_type = other RNA
ctttattctgccttgccagg

SEQ ID NO: 2911 - RNA, 20 nt, synthetic construct
  source 1..20: mol_type = other RNA
agcttgttcactttattctg

SEQ ID NO: 2912 - RNA, 20 nt, synthetic construct
  source 1..20: mol_type = other RNA
ttccagcttgttcactttat

SEQ ID NO: 2913 - RNA, 20 nt, synthetic construct
  source 1..20: mol_type = other RNA
tcgggactacctgcaggctg

SEQ ID NO: 2914 - RNA, 20 nt, synthetic construct
  source 1..20: mol_type = other RNA
attcacttcacactgcagca

SEQ ID NO: 2915 - RNA, 20 nt, synthetic construct
  source 1..20: mol_type = other RNA
cttcacactgcagcactact

SEQ ID NO: 2916 - RNA, 20 nt, synthetic construct
  source 1..20: mol_type = other RNA
cactgcagcactactcagcc

SEQ ID NO: 2917 - RNA, 20 nt, synthetic construct
  source 1..20: mol_type = other RNA
agaggaagcatcttgttttc

SEQ ID NO: 2918 - RNA, 20 nt, synthetic construct
  source 1..20: mol_type = other RNA
tctggaatgtgagtccaaag

SEQ ID NO: 2919 - RNA, 20 nt, synthetic construct
  source 1..20: mol_type = other RNA
ctcagctgtggaaattcttt

SEQ ID NO: 2920 - RNA, 20 nt, synthetic construct
  source 1..20: mol_type = other RNA
acagctgagggaaaacaaga

SEQ ID NO: 2921 - RNA, 20 nt, synthetic construct
  source 1..20: mol_type = other RNA
ttttggaaagcttaagagca

SEQ ID NO: 2922 - RNA, 20 nt, synthetic construct
  source 1..20: mol_type = other RNA
aaaaagaatttccacagctg

SEQ ID NO: 2923 - RNA, 20 nt, synthetic construct
  source 1..20: mol_type = other RNA
cattggcaggactactctcc

SEQ ID NO: 2924 - RNA, 20 nt, synthetic construct
  source 1..20: mol_type = other RNA
tgattgctctttttcattca

SEQ ID NO: 2925 - RNA, 20 nt, synthetic construct
  source 1..20: mol_type = other RNA
ttcaacaaagctgtggcata

SEQ ID NO: 2926 - RNA, 20 nt, synthetic construct
  source 1..20: mol_type = other RNA
acaaagctgtggcatacgct

SEQ ID NO: 2927 - RNA, 20 nt, synthetic construct
  source 1..20: mol_type = other RNA
gcaggacacgttagcgtatg

SEQ ID NO: 2928 - RNA, 20 nt, synthetic construct
  source 1..20: mol_type = other RNA
aacacaagacgacaaagtta

SEQ ID NO: 2929 - RNA, 20 nt, synthetic construct
  source 1..20: mol_type = other RNA
gtggcagcagcaaccgccag

SEQ ID NO: 2930 - RNA, 20 nt, synthetic construct
  source 1..20: mol_type = other RNA
ctggcggttgctgctgccac

SEQ ID NO: 2931 - RNA, 20 nt, synthetic construct
  source 1..20: mol_type = other RNA
tctgaccttcagtgggaccg

SEQ ID NO: 2932 - RNA, 20 nt, synthetic construct
  source 1..20: mol_type = other RNA
gtgggaccggaggcctgaga

SEQ ID NO: 2933 - RNA, 20 nt, synthetic construct
  source 1..20: mol_type = other RNA
tcacagtcaccagaaccccc

SEQ ID NO: 2934 - RNA, 20 nt, synthetic construct
  source 1..20: mol_type = other RNA
ggtgactgtgatgaaggcct

SEQ ID NO: 2935 - RNA, 20 nt, synthetic construct
  source 1..20: mol_type = other RNA
ttctagacaaataatctgca

SEQ ID NO: 2936 - RNA, 20 nt, synthetic construct
  source 1..20: mol_type = other RNA
agacaaataatctgcacaaa

SEQ ID NO: 2937 - RNA, 20 nt, synthetic construct
  source 1..20: mol_type = other RNA
tttcatagaaatccaattgt

SEQ ID NO: 2938 - RNA, 20 nt, synthetic construct
  source 1..20: mol_type = other RNA
tagaaatccaattgtttctt

SEQ ID NO: 2939 - RNA, 20 nt, synthetic construct
  source 1..20: mol_type = other RNA
atgaaaagaaaacagattgg

SEQ ID NO: 2940 - RNA, 20 nt, synthetic construct
  source 1..20: mol_type = other RNA
tctgcttgttctcatcttca

SEQ ID NO: 2941 - RNA, 20 nt, synthetic construct
  source 1..20: mol_type = other RNA
gcttgttctcatcttcaact

SEQ ID NO: 2942 - RNA, 20 nt, synthetic construct
  source 1..20: mol_type = other RNA
catcttcaactcatacctct

SEQ ID NO: 2943 - RNA, 20 nt, synthetic construct
  source 1..20: mol_type = other RNA
actcatacctctcttctcag

SEQ ID NO: 2944 - RNA, 20 nt, synthetic construct
  source 1..20: mol_type = other RNA
cagaggttgcagtttctgag

SEQ ID NO: 2945 - RNA, 20 nt, synthetic construct
  source 1..20: mol_type = other RNA
gagaaacacactgaaaatcc

SEQ ID NO: 2946 - RNA, 20 nt, synthetic construct
  source 1..20: mol_type = other RNA
cagaaactgcaacctctgag

SEQ ID NO: 2947 - RNA, 20 nt, synthetic construct
  source 1..20: mol_type = other RNA
gtgtgtttctcagaaactgc

SEQ ID NO: 2948 - RNA, 20 nt, synthetic construct
  source 1..20: mol_type = other RNA
gctcaggtgagagttgtctc

SEQ ID NO: 2949 - RNA, 20 nt, synthetic construct
  source 1..20: mol_type = other RNA
ctgaaaggtttttccagttg

SEQ ID NO: 2950 - RNA, 20 nt, synthetic construct
  source 1..20: mol_type = other RNA
gcgaaccatttcagctcagg

SEQ ID NO: 2951 - RNA, 20 nt, synthetic construct
  source 1..20: mol_type = other RNA
agttgatgtttcattagaga

SEQ ID NO: 2952 - RNA, 20 nt, synthetic construct
  source 1..20: mol_type = other RNA
ttagagacattactctgtgg

SEQ ID NO: 2953 - RNA, 20 nt, synthetic construct
  source 1..20: mol_type = other RNA
gacatctgagatgaaaggtc

SEQ ID NO: 2954 - RNA, 20 nt, synthetic construct
  source 1..20: mol_type = other RNA
tctcagatgtcagaacatta

SEQ ID NO: 2955 - RNA, 20 nt, synthetic construct
  source 1..20: mol_type = other RNA
cagtttctaccattagatat

SEQ ID NO: 2956 - RNA, 20 nt, synthetic construct
  source 1..20: mol_type = other RNA
accattagatattgagtctt

SEQ ID NO: 2957 - RNA, 20 nt, synthetic construct
  source 1..20: mol_type = other RNA
atcacataaagcgattcaag

SEQ ID NO: 2958 - RNA, 20 nt, synthetic construct
  source 1..20: mol_type = other RNA
agacctcagtcaagtattgc

SEQ ID NO: 2959 - RNA, 20 nt, synthetic construct
  source 1..20: mol_type = other RNA
tatatcatcatccctacctt

SEQ ID NO: 2960 - RNA, 20 nt, synthetic construct
  source 1..20: mol_type = other RNA
cctatgaagttaagacatat

SEQ ID NO: 2961 - RNA, 20 nt, synthetic construct
  source 1..20: mol_type = other RNA
taggggaaaaggtagggatg

SEQ ID NO: 2962 - RNA, 20 nt, synthetic construct
  source 1..20: mol_type = other RNA
ttgctacagtttatatcttg

SEQ ID NO: 2963 - RNA, 20 nt, synthetic construct
  source 1..20: mol_type = other RNA
aacatttctttgctacagtt

SEQ ID NO: 2964 - RNA, 20 nt, synthetic construct
  source 1..20: mol_type = other RNA
gatttcaaacatttctttgc

SEQ ID NO: 2965 - RNA, 20 nt, synthetic construct
  source 1..20: mol_type = other RNA
gttctagagatttttcctga

SEQ ID NO: 2966 - RNA, 20 nt, synthetic construct
  source 1..20: mol_type = other RNA
agagatttttcctgacaaga

SEQ ID NO: 2967 - RNA, 20 nt, synthetic construct
  source 1..20: mol_type = other RNA
tgacaagatgtgctattatt

SEQ ID NO: 2968 - RNA, 20 nt, synthetic construct
  source 1..20: mol_type = other RNA
tatgttacagctagaaaaat

SEQ ID NO: 2969 - RNA, 20 nt, synthetic construct
  source 1..20: mol_type = other RNA
agctgtaacataggaatcaa

SEQ ID NO: 2970 - RNA, 20 nt, synthetic construct
  source 1..20: mol_type = other RNA
atgttcagttaccttcttct

SEQ ID NO: 2971 - RNA, 20 nt, synthetic construct
  source 1..20: mol_type = other RNA
gttaccttcttctgtagcca

SEQ ID NO: 2972 - RNA, 20 nt, synthetic construct
  source 1..20: mol_type = other RNA
tctgtagccactgcacagcc

SEQ ID NO: 2973 - RNA, 20 nt, synthetic construct
  source 1..20: mol_type = other RNA
gtagccactgcacagcccag

SEQ ID NO: 2974 - RNA, 20 nt, synthetic construct
  source 1..20: mol_type = other RNA
caccactggagctgggctgt

SEQ ID NO: 2975 - RNA, 20 nt, synthetic construct
  source 1..20: mol_type = other RNA
ccttgaagtactccttagct

SEQ ID NO: 2976 - RNA, 20 nt, synthetic construct
  source 1..20: mol_type = other RNA
aggagaattcccaccactgg

SEQ ID NO: 2977 - RNA, 20 nt, synthetic construct
  source 1..20: mol_type = other RNA
ttctttgcttgttcctagtg

SEQ ID NO: 2978 - RNA, 20 nt, synthetic construct
  source 1..20: mol_type = other RNA
ttgcttgttcctagtgcttc

SEQ ID NO: 2979 - RNA, 20 nt, synthetic construct
  source 1..20: mol_type = other RNA
tagtgcttcattttgaaacg

SEQ ID NO: 2980 - RNA, 20 nt, synthetic construct
  source 1..20: mol_type = other RNA
ttttgaaacgtaaatgctag

SEQ ID NO: 2981 - RNA, 20 nt, synthetic construct
  source 1..20: mol_type = other RNA
aaatgaagcactaggaacaa

SEQ ID NO: 2982 - RNA, 20 nt, synthetic construct
  source 1..20: mol_type = other RNA
ttaaaattcagttgtcttta

SEQ ID NO: 2983 - RNA, 20 nt, synthetic construct
  source 1..20: mol_type = other RNA
gttgtctttatatttgtgat

SEQ ID NO: 2984 - RNA, 20 nt, synthetic construct
  source 1..20: mol_type = other RNA
acttaaatggggttcctaga

SEQ ID NO: 2985 - RNA, 20 nt, synthetic construct
  source 1..20: mol_type = other RNA
tagagtagtcaaattcatgg

SEQ ID NO: 2986 - RNA, 20 nt, synthetic construct
  source 1..20: mol_type = other RNA
tggagacagaaattacaatt

SEQ ID NO: 2987 - RNA, 20 nt, synthetic construct
  source 1..20: mol_type = other RNA
gtctccatgaatttgactac

SEQ ID NO: 2988 - RNA, 20 nt, synthetic construct
  source 1..20: mol_type = other RNA
cccaggggctgggggaaggg

SEQ ID NO: 2989 - RNA, 20 nt, synthetic construct
  source 1..20: mol_type = other RNA
cccagcccctgggggaagca

SEQ ID NO: 2990 - RNA, 20 nt, synthetic construct
  source 1..20: mol_type = other RNA
tcccttcccccagcccctgg

SEQ ID NO: 2991 - RNA, 20 nt, synthetic construct
  source 1..20: mol_type = other RNA
ataggtccagagtttcagtt

SEQ ID NO: 2992 - RNA, 20 nt, synthetic construct
  source 1..20: mol_type = other RNA
gtttcagaagatgaaaagag

SEQ ID NO: 2993 - RNA, 20 nt, synthetic construct
  source 1..20: mol_type = other RNA
gaagatgaaaagagttctgg

SEQ ID NO: 2994 - RNA, 20 nt, synthetic construct
  source 1..20: mol_type = other RNA
gaaactgaaactctggacct

SEQ ID NO: 2995 - RNA, 20 nt, synthetic construct
  source 1..20: mol_type = other RNA
tcttctgaaactgaaactct

SEQ ID NO: 2996 - RNA, 20 nt, synthetic construct
  source 1..20: mol_type = other RNA
ggagatggatggtggtgatg

SEQ ID NO: 2997 - RNA, 20 nt, synthetic construct
  source 1..20: mol_type = other RNA
cactgatgtgcaaccatcac

SEQ ID NO: 2998 - RNA, 20 nt, synthetic construct
  source 1..20: mol_type = other RNA
gtgactttaagtacattcac

SEQ ID NO: 2999 - RNA, 20 nt, synthetic construct
  source 1..20: mol_type = other RNA
aatagtaaattttatgttat

SEQ ID NO: 3000 - RNA, 20 nt, synthetic construct
  source 1..20: mol_type = other RNA
ccacaattaaaaaaaaaaga

SEQ ID NO: 3001 - RNA, 20 nt, synthetic construct
  source 1..20: mol_type = other RNA
tttttttttaattgtggtga

SEQ ID NO: 3002 - RNA, 20 nt, synthetic construct
  source 1..20: mol_type = other RNA
ttttgcagtcaatcagcctg

SEQ ID NO: 3003 - RNA, 20 nt, synthetic construct
  source 1..20: mol_type = other RNA
agttttcactctatgactct

SEQ ID NO: 3004 - RNA, 20 nt, synthetic construct
  source 1..20: mol_type = other RNA
ctctatgactctaggcatgt

SEQ ID NO: 3005 - RNA, 20 nt, synthetic construct
  source 1..20: mol_type = other RNA
tgaggttagtacagttgtga

SEQ ID NO: 3006 - RNA, 20 nt, synthetic construct
  source 1..20: mol_type = other RNA
tctttgtaacaacttcatga

SEQ ID NO: 3007 - RNA, 20 nt, synthetic construct
  source 1..20: mol_type = other RNA
tgacacggtgcctgggttca

SEQ ID NO: 3008 - RNA, 20 nt, synthetic construct
  source 1..20: mol_type = other RNA
caagtgctcaggagctacag

SEQ ID NO: 3009 - RNA, 20 nt, synthetic construct
  source 1..20: mol_type = other RNA
aatcatgtcacctgtagctc

SEQ ID NO: 3010 - RNA, 20 nt, synthetic construct
  source 1..20: mol_type = other RNA
gaggttagggacctagagcc

SEQ ID NO: 3011 - RNA, 20 nt, synthetic construct
  source 1..20: mol_type = other RNA
ggctctaggtccctaacctc

SEQ ID NO: 3012 - RNA, 20 nt, synthetic construct
  source 1..20: mol_type = other RNA
cattaatgtaacccagctac

SEQ ID NO: 3013 - RNA, 20 nt, synthetic construct
  source 1..20: mol_type = other RNA
ctcaaggtttctcattaatg

SEQ ID NO: 3014 - RNA, 20 nt, synthetic construct
  source 1..20: mol_type = other RNA
tgagctttcactcaaggttt

SEQ ID NO: 3015 - RNA, 20 nt, synthetic construct
  source 1..20: mol_type = other RNA
tgcctttctgacataaggcc

SEQ ID NO: 3016 - RNA, 20 nt, synthetic construct
  source 1..20: mol_type = other RNA
gacataaggcctgatgggtg

SEQ ID NO: 3017 - RNA, 20 nt, synthetic construct
  source 1..20: mol_type = other RNA
gggattctataaagatctgt

SEQ ID NO: 3018 - RNA, 20 nt, synthetic construct
  source 1..20: mol_type = other RNA
ataaagatctgtcactcttt

SEQ ID NO: 3019 - RNA, 20 nt, synthetic construct
  source 1..20: mol_type = other RNA
cctcatatttttttgagatc

SEQ ID NO: 3020 - RNA, 20 nt, synthetic construct
  source 1..20: mol_type = other RNA
gtaccttccaagcaagcagg

SEQ ID NO: 3021 - RNA, 20 nt, synthetic construct
  source 1..20: mol_type = other RNA
aagcaagcaggccctgactg

SEQ ID NO: 3022 - RNA, 20 nt, synthetic construct
  source 1..20: mol_type = other RNA
ccaggtatcaaaaccgggca

SEQ ID NO: 3023 - RNA, 20 nt, synthetic construct
  source 1..20: mol_type = other RNA
ccttctgctcatatgtgact

SEQ ID NO: 3024 - RNA, 20 nt, synthetic construct
  source 1..20: mol_type = other RNA
gctcatatgtgacttgtaat

SEQ ID NO: 3025 - RNA, 20 nt, synthetic construct
  source 1..20: mol_type = other RNA
tccctgcattttaattcaat

SEQ ID NO: 3026 - RNA, 20 nt, synthetic construct
  source 1..20: mol_type = other RNA
atacttacttttgagcaaga

SEQ ID NO: 3027 - RNA, 20 nt, synthetic construct
  source 1..20: mol_type = other RNA
tgtcactcttgctcaaaagt

SEQ ID NO: 3028 - RNA, 20 nt, synthetic construct
  source 1..20: mol_type = other RNA
ctcagctttgatgcaccaca

SEQ ID NO: 3029 - RNA, 20 nt, synthetic construct
  source 1..20: mol_type = other RNA
cttccctcagctttgatgca

SEQ ID NO: 3030 - RNA, 20 nt, synthetic construct
  source 1..20: mol_type = other RNA
gttgagtcttttattgttaa

SEQ ID NO: 3031 - RNA, 20 nt, synthetic construct
  source 1..20: mol_type = other RNA
aaaaatcgacaaactatttt

SEQ ID NO: 3032 - RNA, 20 nt, synthetic construct
  source 1..20: mol_type = other RNA
ttatctgtttattaaaatag

SEQ ID NO: 3033 - RNA, 20 nt, synthetic construct
  source 1..20: mol_type = other RNA
gttgagtcaggcaccaccat

SEQ ID NO: 3034 - RNA, 20 nt, synthetic construct
  source 1..20: mol_type = other RNA
aatgggtggaaacactactt

SEQ ID NO: 3035 - RNA, 20 nt, synthetic construct
  source 1..20: mol_type = other RNA
acccattagaatttagggat

SEQ ID NO: 3036 - RNA, 20 nt, synthetic construct
  source 1..20: mol_type = other RNA
cctaaaagtcaaacttgcag

SEQ ID NO: 3037 - RNA, 20 nt, synthetic construct
  source 1..20: mol_type = other RNA
gttctcctaaaagtcaaact

SEQ ID NO: 3038 - RNA, 20 nt, synthetic construct
  source 1..20: mol_type = other RNA
tgttcagttctcctaaaagt

SEQ ID NO: 3039 - RNA, 20 nt, synthetic construct
  source 1..20: mol_type = other RNA
cctagagacttttccacata

SEQ ID NO: 3040 - RNA, 20 nt, synthetic construct
  source 1..20: mol_type = other RNA
acatatcatattactgagag

SEQ ID NO: 3041 - RNA, 20 nt, synthetic construct
  source 1..20: mol_type = other RNA
agtacttttagattgataaa

SEQ ID NO: 3042 - RNA, 20 nt, synthetic construct
  source 1..20: mol_type = other RNA
tttatcaatctaaaagtact

SEQ ID NO: 3043 - RNA, 20 nt, synthetic construct
  source 1..20: mol_type = other RNA
gcaattatcacctgctctat

SEQ ID NO: 3044 - RNA, 20 nt, synthetic construct
  source 1..20: mol_type = other RNA
tcatgttgctcaggctggtc

SEQ ID NO: 3045 - RNA, 20 nt, synthetic construct
  source 1..20: mol_type = other RNA
agtctagagtgcagtggcat

SEQ ID NO: 3046 - RNA, 20 nt, synthetic construct
  source 1..20: mol_type = other RNA
agacggcctgtgtgtggctc

SEQ ID NO: 3047 - RNA, 20 nt, synthetic construct
  source 1..20: mol_type = other RNA
aaagggtggcctgaaaagct

SEQ ID NO: 3048 - RNA, 20 nt, synthetic construct
  source 1..20: mol_type = other RNA
ggccaccctttggaacgctg

SEQ ID NO: 3049 - RNA, 20 nt, synthetic construct
  source 1..20: mol_type = other RNA
gcttttcaggccaccctttg

SEQ ID NO: 3050 - RNA, 20 nt, synthetic construct
  source 1..20: mol_type = other RNA
acaacagaaaaaggccctaa

SEQ ID NO: 3051 - RNA, 20 nt, synthetic construct
  source 1..20: mol_type = other RNA
gttgtagaaaaaagatttaa

SEQ ID NO: 3052 - RNA, 20 nt, synthetic construct
  source 1..20: mol_type = other RNA
gattaagtggaaatacaggt

SEQ ID NO: 3053 - RNA, 20 nt, synthetic construct
  source 1..20: mol_type = other RNA
acttaatctgaatcatttta

SEQ ID NO: 3054 - RNA, 20 nt, synthetic construct
  source 1..20: mol_type = other RNA
accatttacctgtatttcca

SEQ ID NO: 3055 - RNA, 20 nt, synthetic construct
  source 1..20: mol_type = other RNA
taactaaactttttctaata

SEQ ID NO: 3056 - RNA, 20 nt, synthetic construct
  source 1..20: mol_type = other RNA
aataaatagctcaggaaagc

SEQ ID NO: 3057 - RNA, 20 nt, synthetic construct
  source 1..20: mol_type = other RNA
tgagctatttattagaaaaa

SEQ ID NO: 3058 - RNA, 20 nt, synthetic construct
  source 1..20: mol_type = other RNA
gaaaaagaaagccctgccca

SEQ ID NO: 3059 - RNA, 20 nt, synthetic construct
  source 1..20: mol_type = other RNA
gaaggctaaattggctttcc

SEQ ID NO: 3060 - RNA, 20 nt, synthetic construct
  source 1..20: mol_type = other RNA
ttttcagaaggctaaattgg

SEQ ID NO: 3061 - RNA, 20 nt, synthetic construct
  source 1..20: mol_type = other RNA
cagtctactcttaagttgtt

SEQ ID NO: 3062 - RNA, 20 nt, synthetic construct
  source 1..20: mol_type = other RNA
catttcatgagcctgacaac

SEQ ID NO: 3063 - RNA, 20 nt, synthetic construct
  source 1..20: mol_type = other RNA
tgagcctgacaacatcctgc

SEQ ID NO: 3064 - RNA, 20 nt, synthetic construct
  source 1..20: mol_type = other RNA
ctccccagtggctacagagt

SEQ ID NO: 3065 - RNA, 20 nt, synthetic construct
  source 1..20: mol_type = other RNA
actctgtagccactggggag

SEQ ID NO: 3066 - RNA, 20 nt, synthetic construct
  source 1..20: mol_type = other RNA
ttctactctgtagccactgg

SEQ ID NO: 3067 - RNA, 20 nt, synthetic construct
  source 1..20: mol_type = other RNA
tgcatcagggagtggccgtt

SEQ ID NO: 3068 - RNA, 20 nt, synthetic construct
  source 1..20: mol_type = other RNA
acaagctaacggccactccc

SEQ ID NO: 3069 - RNA, 20 nt, synthetic construct
  source 1..20: mol_type = other RNA
ggggtgctgtgagttttttt

SEQ ID NO: 3070 - RNA, 20 nt, synthetic construct
  source 1..20: mol_type = other RNA
tttaccagataaggcaagat

SEQ ID NO: 3071 - RNA, 20 nt, synthetic construct
  source 1..20: mol_type = other RNA
tgactaaaagaggagaaatg

SEQ ID NO: 3072 - RNA, 20 nt, synthetic construct
  source 1..20: mol_type = other RNA
cctcttttagtcaggaaggt

SEQ ID NO: 3073 - RNA, 20 nt, synthetic construct
  source 1..20: mol_type = other RNA
caccctacacatttctcctc

SEQ ID NO: 3074 - RNA, 20 nt, synthetic construct
  source 1..20: mol_type = other RNA
gaccagaatgagggagccca

SEQ ID NO: 3075 - RNA, 20 nt, synthetic construct
  source 1..20: mol_type = other RNA
ggtcagaaaaattaaaaccc

SEQ ID NO: 3076 - RNA, 20 nt, synthetic construct
  source 1..20: mol_type = other RNA
actgtatcagtcactgtaga

SEQ ID NO: 3077 - RNA, 20 nt, synthetic construct
  source 1..20: mol_type = other RNA
gcctcctgctactctcggtg

SEQ ID NO: 3078 - RNA, 20 nt, synthetic construct
  source 1..20: mol_type = other RNA
ggccagttctgcctcctgct

SEQ ID NO: 3079 - RNA, 20 nt, synthetic construct
  source 1..20: mol_type = other RNA
gtctcaaacacaaatttgac

SEQ ID NO: 3080 - RNA, 20 nt, synthetic construct
  source 1..20: mol_type = other RNA
ataacctgggaaaggaagaa

SEQ ID NO: 3081 - RNA, 20 nt, synthetic construct
  source 1..20: mol_type = other RNA
caggttattgaagatcctat

SEQ ID NO: 3082 - RNA, 20 nt, synthetic construct
  source 1..20: mol_type = other RNA
tttcccaggttattgaagat

SEQ ID NO: 3083 - RNA, 20 nt, synthetic construct
  source 1..20: mol_type = other RNA
tcctttcccaggttattgaa

SEQ ID NO: 3084 - RNA, 20 nt, synthetic construct
  source 1..20: mol_type = other RNA
tttatttactaatttttgtt

SEQ ID NO: 3085 - RNA, 20 nt, synthetic construct
  source 1..20: mol_type = other RNA
ttcttttatttactaatttt

SEQ ID NO: 3086 - RNA, 20 nt, synthetic construct
  source 1..20: mol_type = other RNA
ttataattctacccaagaga

SEQ ID NO: 3087 - RNA, 20 nt, synthetic construct
  source 1..20: mol_type = other RNA
acccaagagattaatttagt

SEQ ID NO: 3088 - RNA, 20 nt, synthetic construct
  source 1..20: mol_type = other RNA
gaactagcctgggcaacaaa

SEQ ID NO: 3089 - RNA, 20 nt, synthetic construct
  source 1..20: mol_type = other RNA
gaactcctggcctcaagtga

SEQ ID NO: 3090 - RNA, 20 nt, synthetic construct
  source 1..20: mol_type = other RNA
ttttttattttttagagatg

SEQ ID NO: 3091 - RNA, 20 nt, synthetic construct
  source 1..20: mol_type = other RNA
agacagagtctccctctgtt

SEQ ID NO: 3092 - RNA, 20 nt, synthetic construct
  source 1..20: mol_type = other RNA
ttttttcaagacagagtctc

SEQ ID NO: 3093 - RNA, 20 nt, synthetic construct
  source 1..20: mol_type = other RNA
cttagttttaagatatattt

SEQ ID NO: 3094 - RNA, 20 nt, synthetic construct
  source 1..20: mol_type = other RNA
tttcctatctatgtgttgct

SEQ ID NO: 3095 - RNA, 20 nt, synthetic construct
  source 1..20: mol_type = other RNA
tatctatgtgttgctatcaa

SEQ ID NO: 3096 - RNA, 20 nt, synthetic construct
  source 1..20: mol_type = other RNA
ctgtgggttatgaggacata

SEQ ID NO: 3097 - RNA, 20 nt, synthetic construct
  source 1..20: mol_type = other RNA
atacatttttactaagcaag

SEQ ID NO: 3098 - RNA, 20 nt, synthetic construct
  source 1..20: mol_type = other RNA
agttcttagtactgaactgt

SEQ ID NO: 3099 - RNA, 20 nt, synthetic construct
  source 1..20: mol_type = other RNA
tagtactgaactgtgcatgg

SEQ ID NO: 3100 - RNA, 20 nt, synthetic construct
  source 1..20: mol_type = other RNA
gtactaagaactagaaatac

SEQ ID NO: 3101 - RNA, 20 nt, synthetic construct
  source 1..20: mol_type = other RNA
tctatcaacaacaaacccat

SEQ ID NO: 3102 - RNA, 20 nt, synthetic construct
  source 1..20: mol_type = other RNA
ttttggtcctagtgctttta

SEQ ID NO: 3103 - RNA, 20 nt, synthetic construct
  source 1..20: mol_type = other RNA
ttacttccttttggtcctag

SEQ ID NO: 3104 - RNA, 20 nt, synthetic construct
  source 1..20: mol_type = other RNA
agttctttacttccttttgg

SEQ ID NO: 3105 - RNA, 20 nt, synthetic construct
  source 1..20: mol_type = other RNA
tactcaaaactctttattaa

SEQ ID NO: 3106 - RNA, 20 nt, synthetic construct
  source 1..20: mol_type = other RNA
gtgccaaggcctctatggag

SEQ ID NO: 3107 - RNA, 20 nt, synthetic construct
  source 1..20: mol_type = other RNA
tgatactccatagaggcctt

SEQ ID NO: 3108 - RNA, 20 nt, synthetic construct
  source 1..20: mol_type = other RNA
aagggaacccaggccctcac

SEQ ID NO: 3109 - RNA, 20 nt, synthetic construct
  source 1..20: mol_type = other RNA
aattcttgatactccataga

SEQ ID NO: 3110 - RNA, 20 nt, synthetic construct
  source 1..20: mol_type = other RNA
cttcgaattcttgatactcc

SEQ ID NO: 3111 - RNA, 20 nt, synthetic construct
  source 1..20: mol_type = other RNA
ttagagagtgagggcctggg

SEQ ID NO: 3112 - RNA, 20 nt, synthetic construct
  source 1..20: mol_type = other RNA
gaggttccttagagagtgag

SEQ ID NO: 3113 - RNA, 20 nt, synthetic construct
  source 1..20: mol_type = other RNA
aatgattctctttccacaat

SEQ ID NO: 3114 - RNA, 20 nt, synthetic construct
  source 1..20: mol_type = other RNA
ctttccacaatacctcttga

SEQ ID NO: 3115 - RNA, 20 nt, synthetic construct
  source 1..20: mol_type = other RNA
acaatacctcttgatctgtc

SEQ ID NO: 3116 - RNA, 20 nt, synthetic construct
  source 1..20: mol_type = other RNA
cactcagaatattcccagac

SEQ ID NO: 3117 - RNA, 20 nt, synthetic construct
  source 1..20: mol_type = other RNA
gagtgtgaaataataaggcc

SEQ ID NO: 3118 - RNA, 20 nt, synthetic construct
  source 1..20: mol_type = other RNA
cagactcctaaatggtcttc

SEQ ID NO: 3119 - RNA, 20 nt, synthetic construct
  source 1..20: mol_type = other RNA
agttcccaatcttgcatcct

SEQ ID NO: 3120 - RNA, 20 nt, synthetic construct
  source 1..20: mol_type = other RNA
caatcttgcatccttcttta

SEQ ID NO: 3121 - RNA, 20 nt, synthetic construct
  source 1..20: mol_type = other RNA
ttactccatccttcaataca

SEQ ID NO: 3122 - RNA, 20 nt, synthetic construct
  source 1..20: mol_type = other RNA
atacaactgccagaggattt

SEQ ID NO: 3123 - RNA, 20 nt, synthetic construct
  source 1..20: mol_type = other RNA
cctgctcttcacacttctga

SEQ ID NO: 3124 - RNA, 20 nt, synthetic construct
  source 1..20: mol_type = other RNA
cacttctgagagtggaaaga

SEQ ID NO: 3125 - RNA, 20 nt, synthetic construct
  source 1..20: mol_type = other RNA
gagagtggaaagaatcctac

SEQ ID NO: 3126 - RNA, 20 nt, synthetic construct
  source 1..20: mol_type = other RNA
actctcagaagtgtgaagag

SEQ ID NO: 3127 - RNA, 20 nt, synthetic construct
  source 1..20: mol_type = other RNA
ttccactctcagaagtgtga

SEQ ID NO: 3128 - RNA, 20 nt, synthetic construct
  source 1..20: mol_type = other RNA
gtttcatggctcttaaaaat

SEQ ID NO: 3129 - RNA, 20 nt, synthetic construct
  source 1..20: mol_type = other RNA
tggctcttaaaaatattttt

SEQ ID NO: 3130 - RNA, 20 nt, synthetic construct
  source 1..20: mol_type = other RNA
tagtacgtacatacagtcaa

SEQ ID NO: 3131 - RNA, 20 nt, synthetic construct
  source 1..20: mol_type = other RNA
ggctttatagtttatcaaat

SEQ ID NO: 3132 - RNA, 20 nt, synthetic construct
  source 1..20: mol_type = other RNA
cagtcaccctcagaggtaca

SEQ ID NO: 3133 - RNA, 20 nt, synthetic construct
  source 1..20: mol_type = other RNA
ccactgtaggccctggcagg

SEQ ID NO: 3134 - RNA, 20 nt, synthetic construct
  source 1..20: mol_type = other RNA
gtcccctgcactacagttgt

SEQ ID NO: 3135 - RNA, 20 nt, synthetic construct
  source 1..20: mol_type = other RNA
tgtcagtcatgtgtctaatg

SEQ ID NO: 3136 - RNA, 20 nt, synthetic construct
  source 1..20: mol_type = other RNA
tttggtctgcatttattgag

SEQ ID NO: 3137 - RNA, 20 nt, synthetic construct
  source 1..20: mol_type = other RNA
ccattcatttggtctgcatt

SEQ ID NO: 3138 - RNA, 20 nt, synthetic construct
  source 1..20: mol_type = other RNA
taaataaaagtgagtcagaa

SEQ ID NO: 3139 - RNA, 20 nt, synthetic construct
  source 1..20: mol_type = other RNA
gactcacttttatttaggaa

SEQ ID NO: 3140 - RNA, 20 nt, synthetic construct
  source 1..20: mol_type = other RNA
tgaagtagttggaacgtatt

SEQ ID NO: 3141 - RNA, 20 nt, synthetic construct
  source 1..20: mol_type = other RNA
tgaaatattggtaagtcata

SEQ ID NO: 3142 - RNA, 20 nt, synthetic construct
  source 1..20: mol_type = other RNA
aactacttcatgaaatattg

SEQ ID NO: 3143 - RNA, 20 nt, synthetic construct
  source 1..20: mol_type = other RNA
ttaactcatgaggtggagcc

SEQ ID NO: 3144 - RNA, 20 nt, synthetic construct
  source 1..20: mol_type = other RNA
agttggttctgaaatatttt

SEQ ID NO: 3145 - RNA, 20 nt, synthetic construct
  source 1..20: mol_type = other RNA
gaaatattttttaaaagcat

SEQ ID NO: 3146 - RNA, 20 nt, synthetic construct
  source 1..20: mol_type = other RNA
gaaccaactagaaacggctc

SEQ ID NO: 3147 - RNA, 20 nt, synthetic construct
  source 1..20: mol_type = other RNA
gtggaaagcatattggaatg

SEQ ID NO: 3148 - RNA, 20 nt, synthetic construct
  source 1..20: mol_type = other RNA
actgaagtttttatgctttt

SEQ ID NO: 3149 - RNA, 20 nt, synthetic construct
  source 1..20: mol_type = other RNA
aatatgctttccactgaagt

SEQ ID NO: 3150 - RNA, 20 nt, synthetic construct
  source 1..20: mol_type = other RNA
agctctatcaccttctggcc

SEQ ID NO: 3151 - RNA, 20 nt, synthetic construct
  source 1..20: mol_type = other RNA
ggccgaccctggacaagtca

SEQ ID NO: 3152 - RNA, 20 nt, synthetic construct
  source 1..20: mol_type = other RNA
aggccttagtttctcaaatg

SEQ ID NO: 3153 - RNA, 20 nt, synthetic construct
  source 1..20: mol_type = other RNA
caaatgctaagtctgggaac

SEQ ID NO: 3154 - RNA, 20 nt, synthetic construct
  source 1..20: mol_type = other RNA
cagacttagcatttgagaaa

SEQ ID NO: 3155 - RNA, 20 nt, synthetic construct
  source 1..20: mol_type = other RNA
gttcccagacttagcatttg

SEQ ID NO: 3156 - RNA, 20 nt, synthetic construct
  source 1..20: mol_type = other RNA
tccagctgcaacactctgat

SEQ ID NO: 3157 - RNA, 20 nt, synthetic construct
  source 1..20: mol_type = other RNA
agctgcaacactctgatact

SEQ ID NO: 3158 - RNA, 20 nt, synthetic construct
  source 1..20: mol_type = other RNA
tagtaaagtatcagagtgtt

SEQ ID NO: 3159 - RNA, 20 nt, synthetic construct
  source 1..20: mol_type = other RNA
taatttcatagtaaagtatc

SEQ ID NO: 3160 - RNA, 20 nt, synthetic construct
  source 1..20: mol_type = other RNA
ccttcctaatttcatagtaa

SEQ ID NO: 3161 - RNA, 20 nt, synthetic construct
  source 1..20: mol_type = other RNA
tttctccttcctaatttcat

SEQ ID NO: 3162 - RNA, 20 nt, synthetic construct
  source 1..20: mol_type = other RNA
tttcttttctccttcctaat

SEQ ID NO: 3163 - RNA, 20 nt, synthetic construct
  source 1..20: mol_type = other RNA
agtcactaaacagatccgat

SEQ ID NO: 3164 - RNA, 20 nt, synthetic construct
  source 1..20: mol_type = other RNA
agaagatgctggtagagcta

SEQ ID NO: 3165 - RNA, 20 nt, synthetic construct
  source 1..20: mol_type = other RNA
ggaaaacaaactaggatatg

SEQ ID NO: 3166 - RNA, 20 nt, synthetic construct
  source 1..20: mol_type = other RNA
tgtagctctaccagcatctt

SEQ ID NO: 3167 - RNA, 20 nt, synthetic construct
  source 1..20: mol_type = other RNA
catttgtattcttgtagctc

SEQ ID NO: 3168 - RNA, 20 nt, synthetic construct
  source 1..20: mol_type = other RNA
tagcatccttaactcagagt

SEQ ID NO: 3169 - RNA, 20 nt, synthetic construct
  source 1..20: mol_type = other RNA
attttataagctgacttttt

SEQ ID NO: 3170 - RNA, 20 nt, synthetic construct
  source 1..20: mol_type = other RNA
cttagtatatcttggcacat

SEQ ID NO: 3171 - RNA, 20 nt, synthetic construct
  source 1..20: mol_type = other RNA
tcacttagtatatcttggca

SEQ ID NO: 3172 - RNA, 20 nt, synthetic construct
  source 1..20: mol_type = other RNA
tagaacacactccttcagcc

SEQ ID NO: 3173 - RNA, 20 nt, synthetic construct
  source 1..20: mol_type = other RNA
atgaattttgccttcttcac

SEQ ID NO: 3174 - RNA, 20 nt, synthetic construct
  source 1..20: mol_type = other RNA
gccattttaataaaatttat

SEQ ID NO: 3175 - RNA, 20 nt, synthetic construct
  source 1..20: mol_type = other RNA
cacttttatacatataaatt

SEQ ID NO: 3176 - RNA, 20 nt, synthetic construct
  source 1..20: mol_type = other RNA
aagaggccaggtacagtact

SEQ ID NO: 3177 - RNA, 20 nt, synthetic construct
  source 1..20: mol_type = other RNA
cgtattataccacctcactg

SEQ ID NO: 3178 - RNA, 20 nt, synthetic construct
  source 1..20: mol_type = other RNA
gtgaggtggtataatacgtg

SEQ ID NO: 3179 - RNA, 20 nt, synthetic construct
  source 1..20: mol_type = other RNA
caggttgtgaggattcagtg

SEQ ID NO: 3180 - RNA, 20 nt, synthetic construct
  source 1..20: mol_type = other RNA
tctatgactgacttcacagg

SEQ ID NO: 3181 - RNA, 20 nt, synthetic construct
  source 1..20: mol_type = other RNA
tcctctatgactgacttcac

SEQ ID NO: 3182 - RNA, 20 nt, synthetic construct
  source 1..20: mol_type = other RNA
tctctttgctatttactaat

SEQ ID NO: 3183 - RNA, 20 nt, synthetic construct
  source 1..20: mol_type = other RNA
ctacagacctatatcagagg

SEQ ID NO: 3184 - RNA, 20 nt, synthetic construct
  source 1..20: mol_type = other RNA
tgttaacactacatgtatca

SEQ ID NO: 3185 - RNA, 20 nt, synthetic construct
  source 1..20: mol_type = other RNA
tttatgcaccagtatttata

SEQ ID NO: 3186 - RNA, 20 nt, synthetic construct
  source 1..20: mol_type = other RNA
gcatgccttcttttatgcac

SEQ ID NO: 3187 - RNA, 20 nt, synthetic construct
  source 1..20: mol_type = other RNA
gtgggcagaaactaatatat

SEQ ID NO: 3188 - RNA, 20 nt, synthetic construct
  source 1..20: mol_type = other RNA
gcccacagaatttctgcatg

SEQ ID NO: 3189 - RNA, 20 nt, synthetic construct
  source 1..20: mol_type = other RNA
actatgtatatattagtttc

SEQ ID NO: 3190 - RNA, 20 nt, synthetic construct
  source 1..20: mol_type = other RNA
tataaagaggcctggaagga

SEQ ID NO: 3191 - RNA, 20 nt, synthetic construct
  source 1..20: mol_type = other RNA
aggcctctttatatgaattt

SEQ ID NO: 3192 - RNA, 20 nt, synthetic construct
  source 1..20: mol_type = other RNA
ttccaggcctctttatatga

SEQ ID NO: 3193 - RNA, 20 nt, synthetic construct
  source 1..20: mol_type = other RNA
tatttatttatttattattt

SEQ ID NO: 3194 - RNA, 20 nt, synthetic construct
  source 1..20: mol_type = other RNA
tggcctatattttttctttt

SEQ ID NO: 3195 - RNA, 20 nt, synthetic construct
  source 1..20: mol_type = other RNA
tttggcctcatttctatgct

SEQ ID NO: 3196 - RNA, 20 nt, synthetic construct
  source 1..20: mol_type = other RNA
atgcttaaatttttcccaaa

SEQ ID NO: 3197 - RNA, 20 nt, synthetic construct
  source 1..20: mol_type = other RNA
caaagagagtgtagtaatta

SEQ ID NO: 3198 - RNA, 20 nt, synthetic construct
  source 1..20: mol_type = other RNA
tttttaatctttaattttta

SEQ ID NO: 3199 - RNA, 20 nt, synthetic construct
  source 1..20: mol_type = other RNA
agtataggctcagttttatt

SEQ ID NO: 3200 - RNA, 20 nt, synthetic construct
  source 1..20: mol_type = other RNA
taatcattctagtataggct

SEQ ID NO: 3201 - RNA, 20 nt, synthetic construct
  source 1..20: mol_type = other RNA
catagcctaagttgtttttc

SEQ ID NO: 3202 - RNA, 20 nt, synthetic construct
  source 1..20: mol_type = other RNA
ttaaggtaagacctcagtta

SEQ ID NO: 3203 - RNA, 20 nt, synthetic construct
  source 1..20: mol_type = other RNA
caatgctgcatttcattaag

SEQ ID NO: 3204 - RNA, 20 nt, synthetic construct
  source 1..20: mol_type = other RNA
ttcacaatgctgcatttcat

SEQ ID NO: 3205 - RNA, 20 nt, synthetic construct
  source 1..20: mol_type = other RNA
gtaatgagcatttttccttc

SEQ ID NO: 3206 - RNA, 20 nt, synthetic construct
  source 1..20: mol_type = other RNA
caccaggtaatgtttgcttt

SEQ ID NO: 3207 - RNA, 20 nt, synthetic construct
  source 1..20: mol_type = other RNA
catgtcacagttaacactcc

SEQ ID NO: 3208 - RNA, 20 nt, synthetic construct
  source 1..20: mol_type = other RNA
gttaaaggcagcaacaacag

SEQ ID NO: 3209 - RNA, 20 nt, synthetic construct
  source 1..20: mol_type = other RNA
ggcagtgttaattatcttaa

SEQ ID NO: 3210 - RNA, 20 nt, synthetic construct
  source 1..20: mol_type = other RNA
taactgttagaagtctatag

SEQ ID NO: 3211 - RNA, 20 nt, synthetic construct
  source 1..20: mol_type = other RNA
aacagttaagaaaccctgtt

SEQ ID NO: 3212 - RNA, 20 nt, synthetic construct
  source 1..20: mol_type = other RNA
gggtgtctaagcctgtctga

SEQ ID NO: 3213 - RNA, 20 nt, synthetic construct
  source 1..20: mol_type = other RNA
gacaggcttagacaccctga

SEQ ID NO: 3214 - RNA, 20 nt, synthetic construct
  source 1..20: mol_type = other RNA
ggagtcgtttccatcagttt

SEQ ID NO: 3215 - RNA, 20 nt, synthetic construct
  source 1..20: mol_type = other RNA
atcagtttttcaaaggcaaa

SEQ ID NO: 3216 - RNA, 20 nt, synthetic construct
  source 1..20: mol_type = other RNA
aaggcaaaagctcccacaat

SEQ ID NO: 3217 - RNA, 20 nt, synthetic construct
  source 1..20: mol_type = other RNA
ggtttttttttttaaattaa

SEQ ID NO: 3218 - RNA, 20 nt, synthetic construct
  source 1..20: mol_type = other RNA
tagattcacatatctgtaaa

SEQ ID NO: 3219 - RNA, 20 nt, synthetic construct
  source 1..20: mol_type = other RNA
catatctgtaaatcaggtag

SEQ ID NO: 3220 - RNA, 20 nt, synthetic construct
  source 1..20: mol_type = other RNA
ctacctgatttacagatatg

SEQ ID NO: 3221 - RNA, 20 nt, synthetic construct
  source 1..20: mol_type = other RNA
tccctacctgatttacagat

SEQ ID NO: 3222 - RNA, 20 nt, synthetic construct
  source 1..20: mol_type = other RNA
agtccttcttccctacctga

SEQ ID NO: 3223 - RNA, 20 nt, synthetic construct
  source 1..20: mol_type = other RNA
agcagagccgcccccagctg

SEQ ID NO: 3224 - RNA, 20 nt, synthetic construct
  source 1..20: mol_type = other RNA
ccttccagcagagccgcccc

SEQ ID NO: 3225 - RNA, 20 nt, synthetic construct
  source 1..20: mol_type = other RNA
gagttgtagtattccaggac

SEQ ID NO: 3226 - RNA, 20 nt, synthetic construct
  source 1..20: mol_type = other RNA
aggaccaggaacacacaaaa

SEQ ID NO: 3227 - RNA, 20 nt, synthetic construct
  source 1..20: mol_type = other RNA
tggtcctggaatactacaac

SEQ ID NO: 3228 - RNA, 20 nt, synthetic construct
  source 1..20: mol_type = other RNA
tccccaatctcttttgtgtg

SEQ ID NO: 3229 - RNA, 20 nt, synthetic construct
  source 1..20: mol_type = other RNA
ttaattgtagagggtttcat

SEQ ID NO: 3230 - RNA, 20 nt, synthetic construct
  source 1..20: mol_type = other RNA
tccatcaaaatcatttcgtt

SEQ ID NO: 3231 - RNA, 20 nt, synthetic construct
  source 1..20: mol_type = other RNA
gccaaggtccagacctccag

SEQ ID NO: 3232 - RNA, 20 nt, synthetic construct
  source 1..20: mol_type = other RNA
gttcagccaaggtccagacc

SEQ ID NO: 3233 - RNA, 20 nt, synthetic construct
  source 1..20: mol_type = other RNA
cttccactaattatttcttt

SEQ ID NO: 3234 - RNA, 20 nt, synthetic construct
  source 1..20: mol_type = other RNA
actaattatttctttttgac

SEQ ID NO: 3235 - RNA, 20 nt, synthetic construct
  source 1..20: mol_type = other RNA
ttttgacatataagaaaact

SEQ ID NO: 3236 - RNA, 20 nt, synthetic construct
  source 1..20: mol_type = other RNA
tatatgtcaaaaagaaataa

SEQ ID NO: 3237 - RNA, 20 nt, synthetic construct
  source 1..20: mol_type = other RNA
aattaagttttcttatatgt

SEQ ID NO: 3238 - RNA, 20 nt, synthetic construct
  source 1..20: mol_type = other RNA
ttcaaattaagttttcttat

SEQ ID NO: 3239 - RNA, 20 nt, synthetic construct
  source 1..20: mol_type = other RNA
taacaatactcttcatgcca

SEQ ID NO: 3240 - RNA, 20 nt, synthetic construct
  source 1..20: mol_type = other RNA
tgccaaacataactcgtaac

SEQ ID NO: 3241 - RNA, 20 nt, synthetic construct
  source 1..20: mol_type = other RNA
tcaaacaggagggaaaaaaa

SEQ ID NO: 3242 - RNA, 20 nt, synthetic construct
  source 1..20: mol_type = other RNA
ctcctgtttgaggaaaattg

SEQ ID NO: 3243 - RNA, 20 nt, synthetic construct
  source 1..20: mol_type = other RNA
aaagccatttttttccctcc

SEQ ID NO: 3244 - RNA, 20 nt, synthetic construct
  source 1..20: mol_type = other RNA
cttcagacatgaacaacaag

SEQ ID NO: 3245 - RNA, 20 nt, synthetic construct
  source 1..20: mol_type = other RNA
gacatgaacaacaaggcttc

SEQ ID NO: 3246 - RNA, 20 nt, synthetic construct
  source 1..20: mol_type = other RNA
tgtctgaagggaaaccttac

SEQ ID NO: 3247 - RNA, 20 nt, synthetic construct
  source 1..20: mol_type = other RNA
acctcctcatggaggggcaa

SEQ ID NO: 3248 - RNA, 20 nt, synthetic construct
  source 1..20: mol_type = other RNA
ttggtctcctaaagctcctg

SEQ ID NO: 3249 - RNA, 20 nt, synthetic construct
  source 1..20: mol_type = other RNA
gttttgtttctttggtctcc

SEQ ID NO: 3250 - RNA, 20 nt, synthetic construct
  source 1..20: mol_type = other RNA
tatggatgtgtattttgtgg

SEQ ID NO: 3251 - RNA, 20 nt, synthetic construct
  source 1..20: mol_type = other RNA
agactcgcacacacactgag

SEQ ID NO: 3252 - RNA, 20 nt, synthetic construct
  source 1..20: mol_type = other RNA
ctgtgtgtgcgagtactgtg

SEQ ID NO: 3253 - RNA, 20 nt, synthetic construct
  source 1..20: mol_type = other RNA
cactccataatctttcaaag

SEQ ID NO: 3254 - RNA, 20 nt, synthetic construct
  source 1..20: mol_type = other RNA
aagaggtaaaaatataaata

SEQ ID NO: 3255 - RNA, 20 nt, synthetic construct
  source 1..20: mol_type = other RNA
taaactatttatatttttac

SEQ ID NO: 3256 - RNA, 20 nt, synthetic construct
  source 1..20: mol_type = other RNA
gcagtatttcataaactatt

SEQ ID NO: 3257 - RNA, 20 nt, synthetic construct
  source 1..20: mol_type = other RNA
gtggcagctttcggcagtat

SEQ ID NO: 3258 - RNA, 20 nt, synthetic construct
  source 1..20: mol_type = other RNA
ccactgtatcttcagtggca

SEQ ID NO: 3259 - RNA, 20 nt, synthetic construct
  source 1..20: mol_type = other RNA
gttcctcaaacaactgttct

SEQ ID NO: 3260 - RNA, 20 nt, synthetic construct
  source 1..20: mol_type = other RNA
tcaaacaactgttctcaaat

SEQ ID NO: 3261 - RNA, 20 nt, synthetic construct
  source 1..20: mol_type = other RNA
caaataatggctaacaccac

SEQ ID NO: 3262 - RNA, 20 nt, synthetic construct
  source 1..20: mol_type = other RNA
gcttagcataggtggtgtta

SEQ ID NO: 3263 - RNA, 20 nt, synthetic construct
  source 1..20: mol_type = other RNA
atatgggttgattctgctta

SEQ ID NO: 3264 - RNA, 20 nt, synthetic construct
  source 1..20: mol_type = other RNA
tttgctagaaaaaccagaat

SEQ ID NO: 3265 - RNA, 20 nt, synthetic construct
  source 1..20: mol_type = other RNA
agcaaatgaaataactcctt

SEQ ID NO: 3266 - RNA, 20 nt, synthetic construct
  source 1..20: mol_type = other RNA
ggtttttctagcaaatgaaa

SEQ ID NO: 3267 - RNA, 20 nt, synthetic construct
  source 1..20: mol_type = other RNA
ttacaaaattgtctgaactc

SEQ ID NO: 3268 - RNA, 20 nt, synthetic construct
  source 1..20: mol_type = other RNA
gacaattttgtaacgaaaat

SEQ ID NO: 3269 - RNA, 20 nt, synthetic construct
  source 1..20: mol_type = other RNA
tccaatgtccctttagagag

SEQ ID NO: 3270 - RNA, 20 nt, synthetic construct
  source 1..20: mol_type = other RNA
ctatcagaaggatgctctgt

SEQ ID NO: 3271 - RNA, 20 nt, synthetic construct
  source 1..20: mol_type = other RNA
gatagagaaatgcttattga

SEQ ID NO: 3272 - RNA, 20 nt, synthetic construct
  source 1..20: mol_type = other RNA
tgccattagatcttcctagt

SEQ ID NO: 3273 - RNA, 20 nt, synthetic construct
  source 1..20: mol_type = other RNA
tagtagcttctgggtctgag

SEQ ID NO: 3274 - RNA, 20 nt, synthetic construct
  source 1..20: mol_type = other RNA
gggtctgagtttgcattcat

SEQ ID NO: 3275 - RNA, 20 nt, synthetic construct
  source 1..20: mol_type = other RNA
tgccttggcttctatgccac

SEQ ID NO: 3276 - RNA, 20 nt, synthetic construct
  source 1..20: mol_type = other RNA
atgccactaactagctgtat

SEQ ID NO: 3277 - RNA, 20 nt, synthetic construct
  source 1..20: mol_type = other RNA
gtgccttagtttttgcatcc

SEQ ID NO: 3278 - RNA, 20 nt, synthetic construct
  source 1..20: mol_type = other RNA
tcctgtctatggatgcaaaa

SEQ ID NO: 3279 - RNA, 20 nt, synthetic construct
  source 1..20: mol_type = other RNA
gtgtgctgtgctttaaattt

SEQ ID NO: 3280 - RNA, 20 nt, synthetic construct
  source 1..20: mol_type = other RNA
gtgttttctgtgtgctgtgc

SEQ ID NO: 3281 - RNA, 20 nt, synthetic construct
  source 1..20: mol_type = other RNA
tgggtcttgtcatgatagtg

SEQ ID NO: 3282 - RNA, 20 nt, synthetic construct
  source 1..20: mol_type = other RNA
gggagacaaaatggaaaatg

SEQ ID NO: 3283 - RNA, 20 nt, synthetic construct
  source 1..20: mol_type = other RNA
attttgtctcccagaactaa

SEQ ID NO: 3284 - RNA, 20 nt, synthetic construct
  source 1..20: mol_type = other RNA
aatatatttcaatgatgtaa

SEQ ID NO: 3285 - RNA, 20 nt, synthetic construct
  source 1..20: mol_type = other RNA
atgatgtaatttatatctgc

SEQ ID NO: 3286 - RNA, 20 nt, synthetic construct
  source 1..20: mol_type = other RNA
ccaggtataatgagataatg

SEQ ID NO: 3287 - RNA, 20 nt, synthetic construct
  source 1..20: mol_type = other RNA
ttttgcactgaagatcagaa

SEQ ID NO: 3288 - RNA, 20 nt, synthetic construct
  source 1..20: mol_type = other RNA
gtgcaaaatgaaaatactca

SEQ ID NO: 3289 - RNA, 20 nt, synthetic construct
  source 1..20: mol_type = other RNA
gatcttcagtgcaaaatgaa

SEQ ID NO: 3290 - RNA, 20 nt, synthetic construct
  source 1..20: mol_type = other RNA
cgaaactaggagactccagc

SEQ ID NO: 3291 - RNA, 20 nt, synthetic construct
  source 1..20: mol_type = other RNA
tgaacctgaccgttctgatc

SEQ ID NO: 3292 - RNA, 20 nt, synthetic construct
  source 1..20: mol_type = other RNA
acacagtagtggttcaaatt

SEQ ID NO: 3293 - RNA, 20 nt, synthetic construct
  source 1..20: mol_type = other RNA
aattaaggtgataaatgagc

SEQ ID NO: 3294 - RNA, 20 nt, synthetic construct
  source 1..20: mol_type = other RNA
gagctcatttatcaccttaa

SEQ ID NO: 3295 - RNA, 20 nt, synthetic construct
  source 1..20: mol_type = other RNA
tttgggagaggtgagagggt

SEQ ID NO: 3296 - RNA, 20 nt, synthetic construct
  source 1..20: mol_type = other RNA
cttatggcaaactagtaaaa

SEQ ID NO: 3297 - RNA, 20 nt, synthetic construct
  source 1..20: mol_type = other RNA
tgttaaactttataatattt

SEQ ID NO: 3298 - RNA, 20 nt, synthetic construct
  source 1..20: mol_type = other RNA
actacttgctagttgaggtg

SEQ ID NO: 3299 - RNA, 20 nt, synthetic construct
  source 1..20: mol_type = other RNA
cattcgactacttgctagtt

SEQ ID NO: 3300 - RNA, 20 nt, synthetic construct
  source 1..20: mol_type = other RNA
tttacttgctaatataatta

SEQ ID NO: 3301 - RNA, 20 nt, synthetic construct
  source 1..20: mol_type = other RNA
gtatctcttcattctaagat

SEQ ID NO: 3302 - RNA, 20 nt, synthetic construct
  source 1..20: mol_type = other RNA
ttctaagatatgttaagctt

SEQ ID NO: 3303 - RNA, 20 nt, synthetic construct
  source 1..20: mol_type = other RNA
aagatatgttaagcttacca

SEQ ID NO: 3304 - RNA, 20 nt, synthetic construct
  source 1..20: mol_type = other RNA
tttgggatgagacatctgaa

SEQ ID NO: 3305 - RNA, 20 nt, synthetic construct
  source 1..20: mol_type = other RNA
gatgtctcatcccaaaggaa

SEQ ID NO: 3306 - RNA, 20 nt, synthetic construct
  source 1..20: mol_type = other RNA
caatacagtggcgttacttg

SEQ ID NO: 3307 - RNA, 20 nt, synthetic construct
  source 1..20: mol_type = other RNA
caaattctcgtgcttgtgct

SEQ ID NO: 3308 - RNA, 20 nt, synthetic construct
  source 1..20: mol_type = other RNA
cgtgcttgtgctgaactcca

SEQ ID NO: 3309 - RNA, 20 nt, synthetic construct
  source 1..20: mol_type = other RNA
gcacaagcacgagaatttgg

SEQ ID NO: 3310 - RNA, 20 nt, synthetic construct
  source 1..20: mol_type = other RNA
ctgatgacagatacgtcgat

SEQ ID NO: 3311 - RNA, 20 nt, synthetic construct
  source 1..20: mol_type = other RNA
gacgacaacactaacagcca

SEQ ID NO: 3312 - RNA, 20 nt, synthetic construct
  source 1..20: mol_type = other RNA
tattatttctgacgacaaca

SEQ ID NO: 3313 - RNA, 20 nt, synthetic construct
  source 1..20: mol_type = other RNA
tcttcatattatttctgacg

SEQ ID NO: 3314 - RNA, 20 nt, synthetic construct
  source 1..20: mol_type = other RNA
taatattctgggctttaatt

SEQ ID NO: 3315 - RNA, 20 nt, synthetic construct
  source 1..20: mol_type = other RNA
gggctttaattatttctcag

SEQ ID NO: 3316 - RNA, 20 nt, synthetic construct
  source 1..20: mol_type = other RNA
cagtgcttgacagaagaggt

SEQ ID NO: 3317 - RNA, 20 nt, synthetic construct
  source 1..20: mol_type = other RNA
gtcaagcactgagaaataat

SEQ ID NO: 3318 - RNA, 20 nt, synthetic construct
  source 1..20: mol_type = other RNA
aaaaccagtccctttatgga

SEQ ID NO: 3319 - RNA, 20 nt, synthetic construct
  source 1..20: mol_type = other RNA
ctgtaggtactgagtgctta

SEQ ID NO: 3320 - RNA, 20 nt, synthetic construct
  source 1..20: mol_type = other RNA
cattatactgaggcacgttg

SEQ ID NO: 3321 - RNA, 20 nt, synthetic construct
  source 1..20: mol_type = other RNA
tcaccacaacagtatcttga

SEQ ID NO: 3322 - RNA, 20 nt, synthetic construct
  source 1..20: mol_type = other RNA
ccacaacagtatcttgagtt

SEQ ID NO: 3323 - RNA, 20 nt, synthetic construct
  source 1..20: mol_type = other RNA
tcatgtactggcagaggtaa

SEQ ID NO: 3324 - RNA, 20 nt, synthetic construct
  source 1..20: mol_type = other RNA
tgtactggcagaggtaaggc

SEQ ID NO: 3325 - RNA, 20 nt, synthetic construct
  source 1..20: mol_type = other RNA
gcctactttgtgattttgag

SEQ ID NO: 3326 - RNA, 20 nt, synthetic construct
  source 1..20: mol_type = other RNA
tttagtcctcaaaatcacaa

SEQ ID NO: 3327 - RNA, 20 nt, synthetic construct
  source 1..20: mol_type = other RNA
cttttaatatttcatttagt

SEQ ID NO: 3328 - RNA, 20 nt, synthetic construct
  source 1..20: mol_type = other RNA
aaagtagaaatgtgctccac

SEQ ID NO: 3329 - RNA, 20 nt, synthetic construct
  source 1..20: mol_type = other RNA
acttttgaaaacattttcac

SEQ ID NO: 3330 - RNA, 20 nt, synthetic construct
  source 1..20: mol_type = other RNA
gctgcatgtataattaatac

SEQ ID NO: 3331 - RNA, 20 nt, synthetic construct
  source 1..20: mol_type = other RNA
ctataattcagctgcatgta

SEQ ID NO: 3332 - RNA, 20 nt, synthetic construct
  source 1..20: mol_type = other RNA
atatccaaggccccattgtc

SEQ ID NO: 3333 - RNA, 20 nt, synthetic construct
  source 1..20: mol_type = other RNA
aactcttccatatccaaggc

SEQ ID NO: 3334 - RNA, 20 nt, synthetic construct
  source 1..20: mol_type = other RNA
acttcaaactcttccatatc

SEQ ID NO: 3335 - RNA, 20 nt, synthetic construct
  source 1..20: mol_type = other RNA
acatagtatccacacacaga

SEQ ID NO: 3336 - RNA, 20 nt, synthetic construct
  source 1..20: mol_type = other RNA
ctttagtgttaaaaaaacaa

SEQ ID NO: 3337 - RNA, 20 nt, synthetic construct
  source 1..20: mol_type = other RNA
tctcagctttctctttagtg

SEQ ID NO: 3338 - RNA, 20 nt, synthetic construct
  source 1..20: mol_type = other RNA
acttaggcttcctctcagct

SEQ ID NO: 3339 - RNA, 20 nt, synthetic construct
  source 1..20: mol_type = other RNA
tgctaagggagacagatttt

SEQ ID NO: 3340 - RNA, 20 nt, synthetic construct
  source 1..20: mol_type = other RNA
tttcctgctaagggagacag

SEQ ID NO: 3341 - RNA, 20 nt, synthetic construct
  source 1..20: mol_type = other RNA
cctgtgtgtaaacacattac

SEQ ID NO: 3342 - RNA, 20 nt, synthetic construct
  source 1..20: mol_type = other RNA
gacccagctctgctggtgtc

SEQ ID NO: 3343 - RNA, 20 nt, synthetic construct
  source 1..20: mol_type = other RNA
caggcaaggagtaaagctca

SEQ ID NO: 3344 - RNA, 20 nt, synthetic construct
  source 1..20: mol_type = other RNA
tccccattctcaggcaagga

SEQ ID NO: 3345 - RNA, 20 nt, synthetic construct
  source 1..20: mol_type = other RNA
tcaaaattaagcagcttcat

SEQ ID NO: 3346 - RNA, 20 nt, synthetic construct
  source 1..20: mol_type = other RNA
tgtattttgaatctatcaaa

SEQ ID NO: 3347 - RNA, 20 nt, synthetic construct
  source 1..20: mol_type = other RNA
aaatacatgaaatgctaaca

SEQ ID NO: 3348 - RNA, 20 nt, synthetic construct
  source 1..20: mol_type = other RNA
tttatttgatagattcaaaa

SEQ ID NO: 3349 - RNA, 20 nt, synthetic construct
  source 1..20: mol_type = other RNA
cccatccatcgtatttcttt

SEQ ID NO: 3350 - RNA, 20 nt, synthetic construct
  source 1..20: mol_type = other RNA
aacaggagagttggttttgg

SEQ ID NO: 3351 - RNA, 20 nt, synthetic construct
  source 1..20: mol_type = other RNA
acactattctaacaaaacaa

SEQ ID NO: 3352 - RNA, 20 nt, synthetic construct
  source 1..20: mol_type = other RNA
aacaaaacaacctcggtaag

SEQ ID NO: 3353 - RNA, 20 nt, synthetic construct
  source 1..20: mol_type = other RNA
ccatgttgcccaaactggtc

SEQ ID NO: 3354 - RNA, 20 nt, synthetic construct
  source 1..20: mol_type = other RNA
atacaaaatacaaagttagc

SEQ ID NO: 3355 - RNA, 20 nt, synthetic construct
  source 1..20: mol_type = other RNA
gtgatcctccctcctcagcc

SEQ ID NO: 3356 - RNA, 20 nt, synthetic construct
  source 1..20: mol_type = other RNA
gggtttcagtgatcctccct

SEQ ID NO: 3357 - RNA, 20 nt, synthetic construct
  source 1..20: mol_type = other RNA
ttttcatttgaacaagagta

SEQ ID NO: 3358 - RNA, 20 nt, synthetic construct
  source 1..20: mol_type = other RNA
tttgaacaagagtattatat

SEQ ID NO: 3359 - RNA, 20 nt, synthetic construct
  source 1..20: mol_type = other RNA
aatgaaaaggaagttgtttg

SEQ ID NO: 3360 - RNA, 20 nt, synthetic construct
  source 1..20: mol_type = other RNA
gtttataacagcacaacttt

SEQ ID NO: 3361 - RNA, 20 nt, synthetic construct
  source 1..20: mol_type = other RNA
ggctgtgttttcagcatctg

SEQ ID NO: 3362 - RNA, 20 nt, synthetic construct
  source 1..20: mol_type = other RNA
gcatctgacttaaaagaacc

SEQ ID NO: 3363 - RNA, 20 nt, synthetic construct
  source 1..20: mol_type = other RNA
tttaagtcagatgctgaaaa

SEQ ID NO: 3364 - RNA, 20 nt, synthetic construct
  source 1..20: mol_type = other RNA
cagccccagagaggaagtag

SEQ ID NO: 3365 - RNA, 20 nt, synthetic construct
  source 1..20: mol_type = other RNA
tctctggggctgtgaacaag

SEQ ID NO: 3366 - RNA, 20 nt, synthetic construct
  source 1..20: mol_type = other RNA
acttcctctctggggctgtg

SEQ ID NO: 3367 - RNA, 20 nt, synthetic construct
  source 1..20: mol_type = other RNA
ctaaaggtttttgaaacccc

SEQ ID NO: 3368 - RNA, 20 nt, synthetic construct
  source 1..20: mol_type = other RNA
aaaacctttagggaataggt

SEQ ID NO: 3369 - RNA, 20 nt, synthetic construct
  source 1..20: mol_type = other RNA
gactggggagggggtttcaa

SEQ ID NO: 3370 - RNA, 20 nt, synthetic construct
  source 1..20: mol_type = other RNA
ctcttatgactttgtcacta

SEQ ID NO: 3371 - RNA, 20 nt, synthetic construct
  source 1..20: mol_type = other RNA
atgggttattagactaaatt

SEQ ID NO: 3372 - RNA, 20 nt, synthetic construct
  source 1..20: mol_type = other RNA
tacaatttagtctaataacc

SEQ ID NO: 3373 - RNA, 20 nt, synthetic construct
  source 1..20: mol_type = other RNA
tcatacaatttagtctaata

SEQ ID NO: 3374 - RNA, 20 nt, synthetic construct
  source 1..20: mol_type = other RNA
ttggagttaaattatcttta

SEQ ID NO: 3375 - RNA, 20 nt, synthetic construct
  source 1..20: mol_type = other RNA
agtctctatggtactactac

SEQ ID NO: 3376 - RNA, 20 nt, synthetic construct
  source 1..20: mol_type = other RNA
taaaagtctaagtagtagta

SEQ ID NO: 3377 - RNA, 20 nt, synthetic construct
  source 1..20: mol_type = other RNA
ttttgtaggtgataaatgtt

SEQ ID NO: 3378 - RNA, 20 nt, synthetic construct
  source 1..20: mol_type = other RNA
tagccgctgtgtttcttttt

SEQ ID NO: 3379 - RNA, 20 nt, synthetic construct
  source 1..20: mol_type = other RNA
actagggatataaaagtagt

SEQ ID NO: 3380 - RNA, 20 nt, synthetic construct
  source 1..20: mol_type = other RNA
tcctaggggccagtcggcaa

SEQ ID NO: 3381 - RNA, 20 nt, synthetic construct
  source 1..20: mol_type = other RNA
gctctgcggcacatgatcag

SEQ ID NO: 3382 - RNA, 20 nt, synthetic construct
  source 1..20: mol_type = other RNA
gaggcattcagctctgcggc

SEQ ID NO: 3383 - RNA, 20 nt, synthetic construct
  source 1..20: mol_type = other RNA
tctgaggcattcagctctgc

SEQ ID NO: 3384 - RNA, 20 nt, synthetic construct
  source 1..20: mol_type = other RNA
ttgctgtcacaagatattga

SEQ ID NO: 3385 - RNA, 20 nt, synthetic construct
  source 1..20: mol_type = other RNA
caatatcttgtgacagcaag

SEQ ID NO: 3386 - RNA, 20 nt, synthetic construct
  source 1..20: mol_type = other RNA
atccagacaaaaattggttt

SEQ ID NO: 3387 - RNA, 20 nt, synthetic construct
  source 1..20: mol_type = other RNA
atttagctgtgtttttaaaa

SEQ ID NO: 3388 - RNA, 20 nt, synthetic construct
  source 1..20: mol_type = other RNA
taaaaaatatattgactcct

SEQ ID NO: 3389 - RNA, 20 nt, synthetic construct
  source 1..20: mol_type = other RNA
atatagaaagtacttgttaa

SEQ ID NO: 3390 - RNA, 20 nt, synthetic construct
  source 1..20: mol_type = other RNA
atatggaaataatattctta

SEQ ID NO: 3391 - RNA, 20 nt, synthetic construct
  source 1..20: mol_type = other RNA
caataactactaaacaatta

SEQ ID NO: 3392 - RNA, 20 nt, synthetic construct
  source 1..20: mol_type = other RNA
actgctatcaatgagtaact

SEQ ID NO: 3393 - RNA, 20 nt, synthetic construct
  source 1..20: mol_type = other RNA
gatgaggtgggtatagttac

SEQ ID NO: 3394 - RNA, 20 nt, synthetic construct
  source 1..20: mol_type = other RNA
tacaagtaatataattcaca

SEQ ID NO: 3395 - RNA, 20 nt, synthetic construct
  source 1..20: mol_type = other RNA
caagatttttaggaagaaac

SEQ ID NO: 3396 - RNA, 20 nt, synthetic construct
  source 1..20: mol_type = other RNA
taaaaatcttgtgaattata

SEQ ID NO: 3397 - RNA, 20 nt, synthetic construct
  source 1..20: mol_type = other RNA
tcctaaaaatcttgtgaatt

SEQ ID NO: 3398 - RNA, 20 nt, synthetic construct
  source 1..20: mol_type = other RNA
atatggtatgttttttatga

SEQ ID NO: 3399 - RNA, 20 nt, synthetic construct
  source 1..20: mol_type = other RNA
gtattaggaaaagatattag

SEQ ID NO: 3400 - RNA, 20 nt, synthetic construct
  source 1..20: mol_type = other RNA
taatacagaagatttatact

SEQ ID NO: 3401 - RNA, 20 nt, synthetic construct
  source 1..20: mol_type = other RNA
taatatcttttcctaataca

SEQ ID NO: 3402 - RNA, 20 nt, synthetic construct
  source 1..20: mol_type = other RNA
acacttttgtacaaaaggta

SEQ ID NO: 3403 - RNA, 20 nt, synthetic construct
  source 1..20: mol_type = other RNA
tgttcaacacttttgtacaa

SEQ ID NO: 3404 - RNA, 20 nt, synthetic construct
  source 1..20: mol_type = other RNA
gggacgtctttgtccaacag

SEQ ID NO: 3405 - RNA, 20 nt, synthetic construct
  source 1..20: mol_type = other RNA
tcagttactggaggtactac

SEQ ID NO: 3406 - RNA, 20 nt, synthetic construct
  source 1..20: mol_type = other RNA
tctaaccagttaaaaagcct

SEQ ID NO: 3407 - RNA, 20 nt, synthetic construct
  source 1..20: mol_type = other RNA
tgtaattttatctttcctct

SEQ ID NO: 3408 - RNA, 20 nt, synthetic construct
  source 1..20: mol_type = other RNA
tcatgtaattttatctttcc

SEQ ID NO: 3409 - RNA, 20 nt, synthetic construct
  source 1..20: mol_type = other RNA
ttttcttcatgtaattttat

SEQ ID NO: 3410 - RNA, 20 nt, synthetic construct
  source 1..20: mol_type = other RNA
tatggtggtttacctcaaat

SEQ ID NO: 3411 - RNA, 20 nt, synthetic construct
  source 1..20: mol_type = other RNA
ttttgttcttatggtggttt

SEQ ID NO: 3412 - RNA, 20 nt, synthetic construct
  source 1..20: mol_type = other RNA
gatggacttatgctttgaag

SEQ ID NO: 3413 - RNA, 20 nt, synthetic construct
  source 1..20: mol_type = other RNA
aagcataagtccatctgaat

SEQ ID NO: 3414 - RNA, 20 nt, synthetic construct
  source 1..20: mol_type = other RNA
gtttttgctcttcaaagcat

SEQ ID NO: 3415 - RNA, 20 nt, synthetic construct
  source 1..20: mol_type = other RNA
agagaaagattggtaccata

SEQ ID NO: 3416 - RNA, 20 nt, synthetic construct
  source 1..20: mol_type = other RNA
ctggaaggtaaaatggataa

SEQ ID NO: 3417 - RNA, 20 nt, synthetic construct
  source 1..20: mol_type = other RNA
tttaattattgctatggtac

SEQ ID NO: 3418 - RNA, 20 nt, synthetic construct
  source 1..20: mol_type = other RNA
gttcctagatttcagagtca

SEQ ID NO: 3419 - RNA, 20 nt, synthetic construct
  source 1..20: mol_type = other RNA
tagatttcagagtcaagggc

SEQ ID NO: 3420 - RNA, 20 nt, synthetic construct
  source 1..20: mol_type = other RNA
gagtcaagggcatcaattct

SEQ ID NO: 3421 - RNA, 20 nt, synthetic construct
  source 1..20: mol_type = other RNA
accgctgagtcacattttct

SEQ ID NO: 3422 - RNA, 20 nt, synthetic construct
  source 1..20: mol_type = other RNA
ccagagccagtatctctctg

SEQ ID NO: 3423 - RNA, 20 nt, synthetic construct
  source 1..20: mol_type = other RNA
ctaaacaccccacctttttt

SEQ ID NO: 3424 - RNA, 20 nt, synthetic construct
  source 1..20: mol_type = other RNA
gaatccctccctccactacg

SEQ ID NO: 3425 - RNA, 20 nt, synthetic construct
  source 1..20: mol_type = other RNA
gaaatgtcttccctaaacac

SEQ ID NO: 3426 - RNA, 20 nt, synthetic construct
  source 1..20: mol_type = other RNA
tcacataatcacagatgcaa

SEQ ID NO: 3427 - RNA, 20 nt, synthetic construct
  source 1..20: mol_type = other RNA
cataatcacagatgcaaaga

SEQ ID NO: 3428 - RNA, 20 nt, synthetic construct
  source 1..20: mol_type = other RNA
ttgcatctgtgattatgtga

SEQ ID NO: 3429 - RNA, 20 nt, synthetic construct
  source 1..20: mol_type = other RNA
agcccctatgcctgtgtctg

SEQ ID NO: 3430 - RNA, 20 nt, synthetic construct
  source 1..20: mol_type = other RNA
gtcaggctgttgctatccat

SEQ ID NO: 3431 - RNA, 20 nt, synthetic construct
  source 1..20: mol_type = other RNA
cggctgagtcgatatcaccg

SEQ ID NO: 3432 - RNA, 20 nt, synthetic construct
  source 1..20: mol_type = other RNA
atgaggcgtcagcgggctct

SEQ ID NO: 3433 - RNA, 20 nt, synthetic construct
  source 1..20: mol_type = other RNA
aagctttccatgaggcgtca

SEQ ID NO: 3434 - RNA, 20 nt, synthetic construct
  source 1..20: mol_type = other RNA
aaacaaataaaatgtttttc

SEQ ID NO: 3435 - RNA, 20 nt, synthetic construct
  source 1..20: mol_type = other RNA
tctttccctcccaccccaac

SEQ ID NO: 3436 - RNA, 20 nt, synthetic construct
  source 1..20: mol_type = other RNA
ttccctcccaccccaactgt

SEQ ID NO: 3437 - RNA, 20 nt, synthetic construct
  source 1..20: mol_type = other RNA
ctcccaccccaactgttttt

SEQ ID NO: 3438 - RNA, 20 nt, synthetic construct
  source 1..20: mol_type = other RNA
agggacttgtccaaaaacag

SEQ ID NO: 3439 - RNA, 20 nt, synthetic construct
  source 1..20: mol_type = other RNA
tctgtgatctagatttaaga

SEQ ID NO: 3440 - RNA, 20 nt, synthetic construct
  source 1..20: mol_type = other RNA
tttcctctgaagatggtatt

SEQ ID NO: 3441 - RNA, 20 nt, synthetic construct
  source 1..20: mol_type = other RNA
tctgaagatggtattcatac

SEQ ID NO: 3442 - RNA, 20 nt, synthetic construct
  source 1..20: mol_type = other RNA
gaggaaacgaactaatgaga

SEQ ID NO: 3443 - RNA, 20 nt, synthetic construct
  source 1..20: mol_type = other RNA
tacttctgcaatattcccat

SEQ ID NO: 3444 - RNA, 20 nt, synthetic construct
  source 1..20: mol_type = other RNA
gcaatattcccatccatcct

SEQ ID NO: 3445 - RNA, 20 nt, synthetic construct
  source 1..20: mol_type = other RNA
catccatcctgtcacaccca

SEQ ID NO: 3446 - RNA, 20 nt, synthetic construct
  source 1..20: mol_type = other RNA
ttttcaaagtactttacaag

SEQ ID NO: 3447 - RNA, 20 nt, synthetic construct
  source 1..20: mol_type = other RNA
aagtactttacaagataaag

SEQ ID NO: 3448 - RNA, 20 nt, synthetic construct
  source 1..20: mol_type = other RNA
atttacggggggaggggggc

SEQ ID NO: 3449 - RNA, 20 nt, synthetic construct
  source 1..20: mol_type = other RNA
tgtctatttgcccccctccc

SEQ ID NO: 3450 - RNA, 20 nt, synthetic construct
  source 1..20: mol_type = other RNA
gtctgatgcccagctgatgg

SEQ ID NO: 3451 - RNA, 20 nt, synthetic construct
  source 1..20: mol_type = other RNA
ctgagcaaatggcttccaag

SEQ ID NO: 3452 - RNA, 20 nt, synthetic construct
  source 1..20: mol_type = other RNA
aagtgtatggccgccattcc

SEQ ID NO: 3453 - RNA, 20 nt, synthetic construct
  source 1..20: mol_type = other RNA
cttctctttctgccgcctgc

SEQ ID NO: 3454 - RNA, 20 nt, synthetic construct
  source 1..20: mol_type = other RNA
ctttctgccgcctgctgtcc

SEQ ID NO: 3455 - RNA, 20 nt, synthetic construct
  source 1..20: mol_type = other RNA
gccgcctgctgtcctgcctt

SEQ ID NO: 3456 - RNA, 20 nt, synthetic construct
  source 1..20: mol_type = other RNA
aatgcagatgttggctttgc

SEQ ID NO: 3457 - RNA, 20 nt, synthetic construct
  source 1..20: mol_type = other RNA
tagaatctgtatttagttca

SEQ ID NO: 3458 - RNA, 20 nt, synthetic construct
  source 1..20: mol_type = other RNA
aggaattactgcttcaaatg

SEQ ID NO: 3459 - RNA, 20 nt, synthetic construct
  source 1..20: mol_type = other RNA
ttgaggcacaatgcctccag

SEQ ID NO: 3460 - RNA, 20 nt, synthetic construct
  source 1..20: mol_type = other RNA
tataaacattagctggaggc

SEQ ID NO: 3461 - RNA, 20 nt, synthetic construct
  source 1..20: mol_type = other RNA
caacaaattggcttcttata

SEQ ID NO: 3462 - RNA, 20 nt, synthetic construct
  source 1..20: mol_type = other RNA
aagttttccatgtagtgtca

SEQ ID NO: 3463 - RNA, 20 nt, synthetic construct
  source 1..20: mol_type = other RNA
atgtagtgtcagctgtttga

SEQ ID NO: 3464 - RNA, 20 nt, synthetic construct
  source 1..20: mol_type = other RNA
aacagctgacactacatgga

SEQ ID NO: 3465 - RNA, 20 nt, synthetic construct
  source 1..20: mol_type = other RNA
caagattgctgtttcaaaca

SEQ ID NO: 3466 - RNA, 20 nt, synthetic construct
  source 1..20: mol_type = other RNA
tccaggggcgttaagtcctt

SEQ ID NO: 3467 - RNA, 20 nt, synthetic construct
  source 1..20: mol_type = other RNA
agagagaaaatcccaacgca

SEQ ID NO: 3468 - RNA, 20 nt, synthetic construct
  source 1..20: mol_type = other RNA
ctctagaaacactccctttt

SEQ ID NO: 3469 - RNA, 20 nt, synthetic construct
  source 1..20: mol_type = other RNA
ggcctgctttggtctgcgtt

SEQ ID NO: 3470 - RNA, 20 nt, synthetic construct
  source 1..20: mol_type = other RNA
tggcctaccctggtgtttgg

SEQ ID NO: 3471 - RNA, 20 nt, synthetic construct
  source 1..20: mol_type = other RNA
tattacctgcaatttaaaac

SEQ ID NO: 3472 - RNA, 20 nt, synthetic construct
  source 1..20: mol_type = other RNA
ccagaatggtggccacagca

SEQ ID NO: 3473 - RNA, 20 nt, synthetic construct
  source 1..20: mol_type = other RNA
ggagaaaaccctagacagtg

SEQ ID NO: 3474 - RNA, 20 nt, synthetic construct
  source 1..20: mol_type = other RNA
ctcacattgcactccagtaa

SEQ ID NO: 3475 - RNA, 20 nt, synthetic construct
  source 1..20: mol_type = other RNA
tactggagtgcaatgtgaga

SEQ ID NO: 3476 - RNA, 20 nt, synthetic construct
  source 1..20: mol_type = other RNA
ggattttcttactggagtgc

SEQ ID NO: 3477 - RNA, 20 nt, synthetic construct
  source 1..20: mol_type = other RNA
ttcaggattttcttactgga

SEQ ID NO: 3478 - RNA, 20 nt, synthetic construct
  source 1..20: mol_type = other RNA
ctttctttcaggattttctt

SEQ ID NO: 3479 - RNA, 20 nt, synthetic construct
  source 1..20: mol_type = other RNA
caccacctttctctttcttt

SEQ ID NO: 3480 - RNA, 20 nt, synthetic construct
  source 1..20: mol_type = other RNA
acaacctcaaccttcccatg

SEQ ID NO: 3481 - RNA, 20 nt, synthetic construct
  source 1..20: mol_type = other RNA
gatacacgctgaaaatttat

SEQ ID NO: 3482 - RNA, 20 nt, synthetic construct
  source 1..20: mol_type = other RNA
gcgtgtatctgaaggtaaag

SEQ ID NO: 3483 - RNA, 20 nt, synthetic construct
  source 1..20: mol_type = other RNA
caataaattttcagcgtgta

SEQ ID NO: 3484 - RNA, 20 nt, synthetic construct
  source 1..20: mol_type = other RNA
gagagacaaaaaagcctgca

SEQ ID NO: 3485 - RNA, 20 nt, synthetic construct
  source 1..20: mol_type = other RNA
gactactaacatgaaggata

SEQ ID NO: 3486 - RNA, 20 nt, synthetic construct
  source 1..20: mol_type = other RNA
ttagatcaatctgtaagcaa

SEQ ID NO: 3487 - RNA, 20 nt, synthetic construct
  source 1..20: mol_type = other RNA
tagtaaatattgcttacaga

SEQ ID NO: 3488 - RNA, 20 nt, synthetic construct
  source 1..20: mol_type = other RNA
tgtttgaagaattaatgatc

SEQ ID NO: 3489 - RNA, 20 nt, synthetic construct
  source 1..20: mol_type = other RNA
ttataaagaccaatcactca

SEQ ID NO: 3490 - RNA, 20 nt, synthetic construct
  source 1..20: mol_type = other RNA
ttctttataaagaccaatca

SEQ ID NO: 3491 - RNA, 20 nt, synthetic construct
  source 1..20: mol_type = other RNA
tgatggagtttattatagtt

SEQ ID NO: 3492 - RNA, 20 nt, synthetic construct
  source 1..20: mol_type = other RNA
tcctgatggagtttattata

SEQ ID NO: 3493 - RNA, 20 nt, synthetic construct
  source 1..20: mol_type = other RNA
acattcttcctgatggagtt

SEQ ID NO: 3494 - RNA, 20 nt, synthetic construct
  source 1..20: mol_type = other RNA
ctgggattcttgagcattag

SEQ ID NO: 3495 - RNA, 20 nt, synthetic construct
  source 1..20: mol_type = other RNA
tgagcattaggaataccaag

SEQ ID NO: 3496 - RNA, 20 nt, synthetic construct
  source 1..20: mol_type = other RNA
taatgctcaagaatcccagt

SEQ ID NO: 3497 - RNA, 20 nt, synthetic construct
  source 1..20: mol_type = other RNA
aacaaattagatcacattac

SEQ ID NO: 3498 - RNA, 20 nt, synthetic construct
  source 1..20: mol_type = other RNA
ttttcaaacaaattagatca

SEQ ID NO: 3499 - RNA, 20 nt, synthetic construct
  source 1..20: mol_type = other RNA
gcaacagacctgttcttttt

SEQ ID NO: 3500 - RNA, 20 nt, synthetic construct
  source 1..20: mol_type = other RNA
ttcagcaacagacctgttct

SEQ ID NO: 3501 - RNA, 20 nt, synthetic construct
  source 1..20: mol_type = other RNA
ctctaatctatttcattcag

SEQ ID NO: 3502 - RNA, 20 nt, synthetic construct
  source 1..20: mol_type = other RNA
tgtggtcactgaatacttgc

SEQ ID NO: 3503 - RNA, 20 nt, synthetic construct
  source 1..20: mol_type = other RNA
gtgaccacaagaagagcctg

SEQ ID NO: 3504 - RNA, 20 nt, synthetic construct
  source 1..20: mol_type = other RNA
ggtcactccaaaatcatctc

SEQ ID NO: 3505 - RNA, 20 nt, synthetic construct
  source 1..20: mol_type = other RNA
tcactgtttcagtgaagaga

SEQ ID NO: 3506 - RNA, 20 nt, synthetic construct
  source 1..20: mol_type = other RNA
gtgaagagagtttaaaatag

SEQ ID NO: 3507 - RNA, 20 nt, synthetic construct
  source 1..20: mol_type = other RNA
ctgaaacagtgaggaaataa

SEQ ID NO: 3508 - RNA, 20 nt, synthetic construct
  source 1..20: mol_type = other RNA
gcttaaagtctattttaaac

SEQ ID NO: 3509 - RNA, 20 nt, synthetic construct
  source 1..20: mol_type = other RNA
agttgaaataaaaagggtta

SEQ ID NO: 3510 - RNA, 20 nt, synthetic construct
  source 1..20: mol_type = other RNA
acttgaaattattgttctgc

SEQ ID NO: 3511 - RNA, 20 nt, synthetic construct
  source 1..20: mol_type = other RNA
tataaccctttttatttcaa

SEQ ID NO: 3512 - RNA, 20 nt, synthetic construct
  source 1..20: mol_type = other RNA
gctctaaatcactggaagag

SEQ ID NO: 3513 - RNA, 20 nt, synthetic construct
  source 1..20: mol_type = other RNA
agtgatttagagctgaagtt

SEQ ID NO: 3514 - RNA, 20 nt, synthetic construct
  source 1..20: mol_type = other RNA
tttaattaaaagactccaac

SEQ ID NO: 3515 - RNA, 20 nt, synthetic construct
  source 1..20: mol_type = other RNA
cgtccttcagaactaataaa

SEQ ID NO: 3516 - RNA, 20 nt, synthetic construct
  source 1..20: mol_type = other RNA
gaactaataaaatattcaac

SEQ ID NO: 3517 - RNA, 20 nt, synthetic construct
  source 1..20: mol_type = other RNA
gaaggacgagaattgataaa

SEQ ID NO: 3518 - RNA, 20 nt, synthetic construct
  source 1..20: mol_type = other RNA
actaaccactgacaagcatc

SEQ ID NO: 3519 - RNA, 20 nt, synthetic construct
  source 1..20: mol_type = other RNA
aaaagttttgatgcttgtca

SEQ ID NO: 3520 - RNA, 20 nt, synthetic construct
  source 1..20: mol_type = other RNA
atggtagcaatccattcttc

SEQ ID NO: 3521 - RNA, 20 nt, synthetic construct
  source 1..20: mol_type = other RNA
tcagtatcaaccctttaaaa

SEQ ID NO: 3522 - RNA, 20 nt, synthetic construct
  source 1..20: mol_type = other RNA
gtatcaaccctttaaaaaaa

SEQ ID NO: 3523 - RNA, 20 nt, synthetic construct
  source 1..20: mol_type = other RNA
attttgtttatatggccatt

SEQ ID NO: 3524 - RNA, 20 nt, synthetic construct
  source 1..20: mol_type = other RNA
caaacaaaagtgaccaatcc

SEQ ID NO: 3525 - RNA, 20 nt, synthetic construct
  source 1..20: mol_type = other RNA
tttaatgtctggcataggat

SEQ ID NO: 3526 - RNA, 20 nt, synthetic construct
  source 1..20: mol_type = other RNA
ttttcagataataaagactg

SEQ ID NO: 3527 - RNA, 20 nt, synthetic construct
  source 1..20: mol_type = other RNA
gataataaagactgagatca

SEQ ID NO: 3528 - RNA, 20 nt, synthetic construct
  source 1..20: mol_type = other RNA
gcacctggtaaggtgcctgc

SEQ ID NO: 3529 - RNA, 20 nt, synthetic construct
  source 1..20: mol_type = other RNA
tcattggttttatggttttt

SEQ ID NO: 3530 - RNA, 20 nt, synthetic construct
  source 1..20: mol_type = other RNA
aaggcagaggtccccaagcc

SEQ ID NO: 3531 - RNA, 20 nt, synthetic construct
  source 1..20: mol_type = other RNA
acaaaagggagggttggggg

SEQ ID NO: 3532 - RNA, 20 nt, synthetic construct
  source 1..20: mol_type = other RNA
atgaaaccactccctgttgc

SEQ ID NO: 3533 - RNA, 20 nt, synthetic construct
  source 1..20: mol_type = other RNA
tggaagacaatttttccaca

SEQ ID NO: 3534 - RNA, 20 nt, synthetic construct
  source 1..20: mol_type = other RNA
aaggcattactctggacata

SEQ ID NO: 3535 - RNA, 20 nt, synthetic construct
  source 1..20: mol_type = other RNA
ctgttcaaaaacctttcacg

SEQ ID NO: 3536 - RNA, 20 nt, synthetic construct
  source 1..20: mol_type = other RNA
aaaacctttcacgatctccc

SEQ ID NO: 3537 - RNA, 20 nt, synthetic construct
  source 1..20: mol_type = other RNA
aagatgtacagaatttatac

SEQ ID NO: 3538 - RNA, 20 nt, synthetic construct
  source 1..20: mol_type = other RNA
aattgggcaaaatcatatcc

SEQ ID NO: 3539 - RNA, 20 nt, synthetic construct
  source 1..20: mol_type = other RNA
gtacatcttcgaattgggca

SEQ ID NO: 3540 - RNA, 20 nt, synthetic construct
  source 1..20: mol_type = other RNA
cacctgagtttcttctttgt

SEQ ID NO: 3541 - RNA, 20 nt, synthetic construct
  source 1..20: mol_type = other RNA
tctttgtccgtagataagtt

SEQ ID NO: 3542 - RNA, 20 nt, synthetic construct
  source 1..20: mol_type = other RNA
ttgtccgtagataagtttga

SEQ ID NO: 3543 - RNA, 20 nt, synthetic construct
  source 1..20: mol_type = other RNA
aacttatctacggacaaaga

SEQ ID NO: 3544 - RNA, 20 nt, synthetic construct
  source 1..20: mol_type = other RNA
tttttcaaacttatctacgg

SEQ ID NO: 3545 - RNA, 20 nt, synthetic construct
  source 1..20: mol_type = other RNA
attcctttttcaaacttatc

SEQ ID NO: 3546 - RNA, 20 nt, synthetic construct
  source 1..20: mol_type = other RNA
ctctcttagactaaattaaa

SEQ ID NO: 3547 - RNA, 20 nt, synthetic construct
  source 1..20: mol_type = other RNA
tgtttccctctcttagacta

SEQ ID NO: 3548 - RNA, 20 nt, synthetic construct
  source 1..20: mol_type = other RNA
cagaagttttatagattatt

SEQ ID NO: 3549 - RNA, 20 nt, synthetic construct
  source 1..20: mol_type = other RNA
gtgaaaaatatcctctttca

SEQ ID NO: 3550 - RNA, 20 nt, synthetic construct
  source 1..20: mol_type = other RNA
taactgtgtaataatctata

SEQ ID NO: 3551 - RNA, 20 nt, synthetic construct
  source 1..20: mol_type = other RNA
tatattgtgtgtgtatcata

SEQ ID NO: 3552 - RNA, 20 nt, synthetic construct
  source 1..20: mol_type = other RNA
atttaaatttttaaaaaggt

SEQ ID NO: 3553 - RNA, 20 nt, synthetic construct
  source 1..20: mol_type = other RNA
taacctttttaaaaatttaa

SEQ ID NO: 3554 - RNA, 20 nt, synthetic construct
  source 1..20: mol_type = other RNA
tttcttttatgaaatcctct

SEQ ID NO: 3555 - RNA, 20 nt, synthetic construct
  source 1..20: mol_type = other RNA
tttatgaaatcctctcaaaa

SEQ ID NO: 3556 - RNA, 20 nt, synthetic construct
  source 1..20: mol_type = other RNA
taaaagaaatgaagacaatg

SEQ ID NO: 3557 - RNA, 20 nt, synthetic construct
  source 1..20: mol_type = other RNA
actacttttccttgagtacc

SEQ ID NO: 3558 - RNA, 20 nt, synthetic construct
  source 1..20: mol_type = other RNA
taatttgtaataaaatatca

SEQ ID NO: 3559 - RNA, 20 nt, synthetic construct
  source 1..20: mol_type = other RNA
tatttctaacaatccagtta

SEQ ID NO: 3560 - RNA, 20 nt, synthetic construct
  source 1..20: mol_type = other RNA
aacaatccagttagttactt

SEQ ID NO: 3561 - RNA, 20 nt, synthetic construct
  source 1..20: mol_type = other RNA
atgaagctaaagacaaaaca

SEQ ID NO: 3562 - RNA, 20 nt, synthetic construct
  source 1..20: mol_type = other RNA
ttgaatgctgtaagtaacta

SEQ ID NO: 3563 - RNA, 20 nt, synthetic construct
  source 1..20: mol_type = other RNA
gttttgttttgtctttagct

SEQ ID NO: 3564 - RNA, 20 nt, synthetic construct
  source 1..20: mol_type = other RNA
tcataaacttgaggttctca

SEQ ID NO: 3565 - RNA, 20 nt, synthetic construct
  source 1..20: mol_type = other RNA
taaacttgaggttctcatct

SEQ ID NO: 3566 - RNA, 20 nt, synthetic construct
  source 1..20: mol_type = other RNA
catctctcaccatctacaaa

SEQ ID NO: 3567 - RNA, 20 nt, synthetic construct
  source 1..20: mol_type = other RNA
tttgtagatggtgagagatg

SEQ ID NO: 3568 - RNA, 20 nt, synthetic construct
  source 1..20: mol_type = other RNA
taaaaataattattaatctt

SEQ ID NO: 3569 - RNA, 20 nt, synthetic construct
  source 1..20: mol_type = other RNA
atttcataaaaataattatt

SEQ ID NO: 3570 - RNA, 20 nt, synthetic construct
  source 1..20: mol_type = other RNA
atatgtgaaggacatttcta

SEQ ID NO: 3571 - RNA, 20 nt, synthetic construct
  source 1..20: mol_type = other RNA
ctttttataagtgcttttta

SEQ ID NO: 3572 - RNA, 20 nt, synthetic construct
  source 1..20: mol_type = other RNA
cctttctcaagttttgaact

SEQ ID NO: 3573 - RNA, 20 nt, synthetic construct
  source 1..20: mol_type = other RNA
caagttttgaacttttaaaa

SEQ ID NO: 3574 - RNA, 20 nt, synthetic construct
  source 1..20: mol_type = other RNA
aaacttgagaaaggggaatt

SEQ ID NO: 3575 - RNA, 20 nt, synthetic construct
  source 1..20: mol_type = other RNA
ctctcctcttttaaaagttc

SEQ ID NO: 3576 - RNA, 20 nt, synthetic construct
  source 1..20: mol_type = other RNA
tttgacatataagatgttat

SEQ ID NO: 3577 - RNA, 20 nt, synthetic construct
  source 1..20: mol_type = other RNA
tataacatcttatatgtcaa

SEQ ID NO: 3578 - RNA, 20 nt, synthetic construct
  source 1..20: mol_type = other RNA
ttaaaccatacccttttggg

SEQ ID NO: 3579 - RNA, 20 nt, synthetic construct
  source 1..20: mol_type = other RNA
caaaagggtatggtttaatg

SEQ ID NO: 3580 - RNA, 20 nt, synthetic construct
  source 1..20: mol_type = other RNA
ggtaaactgccatgtgaagg

SEQ ID NO: 3581 - RNA, 20 nt, synthetic construct
  source 1..20: mol_type = other RNA
catggcagtttacctgaatt

SEQ ID NO: 3582 - RNA, 20 nt, synthetic construct
  source 1..20: mol_type = other RNA
tttgtccttcacatggcagt

SEQ ID NO: 3583 - RNA, 20 nt, synthetic construct
  source 1..20: mol_type = other RNA
gaatttagatccttgtcctg

SEQ ID NO: 3584 - RNA, 20 nt, synthetic construct
  source 1..20: mol_type = other RNA
gaactgtctactcagtccag

SEQ ID NO: 3585 - RNA, 20 nt, synthetic construct
  source 1..20: mol_type = other RNA
tcttttctgaacctgttttt

SEQ ID NO: 3586 - RNA, 20 nt, synthetic construct
  source 1..20: mol_type = other RNA
tttctgaacctgtttttcca

SEQ ID NO: 3587 - RNA, 20 nt, synthetic construct
  source 1..20: mol_type = other RNA
gaacctgtttttccatccaa

SEQ ID NO: 3588 - RNA, 20 nt, synthetic construct
  source 1..20: mol_type = other RNA
gaaaagaagaagtatgtgcc

SEQ ID NO: 3589 - RNA, 20 nt, synthetic construct
  source 1..20: mol_type = other RNA
atccaaaaaatgagaataaa

SEQ ID NO: 3590 - RNA, 20 nt, synthetic construct
  source 1..20: mol_type = other RNA
cattttttggatggaaaaac

SEQ ID NO: 3591 - RNA, 20 nt, synthetic construct
  source 1..20: mol_type = other RNA
cccttagaattttttatatg

SEQ ID NO: 3592 - RNA, 20 nt, synthetic construct
  source 1..20: mol_type = other RNA
aagggggaatatccacgtgg

SEQ ID NO: 3593 - RNA, 20 nt, synthetic construct
  source 1..20: mol_type = other RNA
tacctggtatattcgagcag

SEQ ID NO: 3594 - RNA, 20 nt, synthetic construct
  source 1..20: mol_type = other RNA
agcaggcattttctccacaa

SEQ ID NO: 3595 - RNA, 20 nt, synthetic construct
  source 1..20: mol_type = other RNA
ccacaaacagtcctttcttc

SEQ ID NO: 3596 - RNA, 20 nt, synthetic construct
  source 1..20: mol_type = other RNA
tctcgccttttttaaccagc

SEQ ID NO: 3597 - RNA, 20 nt, synthetic construct
  source 1..20: mol_type = other RNA
cgccttttttaaccagcttg

SEQ ID NO: 3598 - RNA, 20 nt, synthetic construct
  source 1..20: mol_type = other RNA
taccaagctggttaaaaaag

SEQ ID NO: 3599 - RNA, 20 nt, synthetic construct
  source 1..20: mol_type = other RNA
gcctatggggccgaggggat

SEQ ID NO: 3600 - RNA, 20 nt, synthetic construct
  source 1..20: mol_type = other RNA
cctcagtcatcccctcggcc

SEQ ID NO: 3601 - RNA, 20 nt, synthetic construct
  source 1..20: mol_type = other RNA
ggtgaagatggagctgacct

SEQ ID NO: 3602 - RNA, 20 nt, synthetic construct
  source 1..20: mol_type = other RNA
ccagaaatttcacctcagtc

SEQ ID NO: 3603 - RNA, 20 nt, synthetic construct
  source 1..20: mol_type = other RNA
atctcttaggtcagctccat

SEQ ID NO: 3604 - RNA, 20 nt, synthetic construct
  source 1..20: mol_type = other RNA
gattctatctcttaggtcag

SEQ ID NO: 3605 - RNA, 20 nt, synthetic construct
  source 1..20: mol_type = other RNA
atacatgtataataatcaaa

SEQ ID NO: 3606 - RNA, 20 nt, synthetic construct
  source 1..20: mol_type = other RNA
taattgttacattatgattg

SEQ ID NO: 3607 - RNA, 20 nt, synthetic construct
  source 1..20: mol_type = other RNA
aattagttgggagaactgat

SEQ ID NO: 3608 - RNA, 20 nt, synthetic construct
  source 1..20: mol_type = other RNA
cccaactaattagaaagtat

SEQ ID NO: 3609 - RNA, 20 nt, synthetic construct
  source 1..20: mol_type = other RNA
ataatgtcaatcagttctcc

SEQ ID NO: 3610 - RNA, 20 nt, synthetic construct
  source 1..20: mol_type = other RNA
ttttgtgcttaaatgttaaa

SEQ ID NO: 3611 - RNA, 20 nt, synthetic construct
  source 1..20: mol_type = other RNA
tccttcatattattgtgaga

SEQ ID NO: 3612 - RNA, 20 nt, synthetic construct
  source 1..20: mol_type = other RNA
ttcatattattgtgagatat

SEQ ID NO: 3613 - RNA, 20 nt, synthetic construct
  source 1..20: mol_type = other RNA
tattattgtgagatatcttt

SEQ ID NO: 3614 - RNA, 20 nt, synthetic construct
  source 1..20: mol_type = other RNA
cagccattaaaaaagcagtg

SEQ ID NO: 3615 - RNA, 20 nt, synthetic construct
  source 1..20: mol_type = other RNA
ctgcttttttaatggctggg

SEQ ID NO: 3616 - RNA, 20 nt, synthetic construct
  source 1..20: mol_type = other RNA
cacatgaaaaagtaaacact

SEQ ID NO: 3617 - RNA, 20 nt, synthetic construct
  source 1..20: mol_type = other RNA
tgtgagaaatatgactatat

SEQ ID NO: 3618 - RNA, 20 nt, synthetic construct
  source 1..20: mol_type = other RNA
tgacccaatatattaaaagg

SEQ ID NO: 3619 - RNA, 20 nt, synthetic construct
  source 1..20: mol_type = other RNA
attctagaatgaaataactt

SEQ ID NO: 3620 - RNA, 20 nt, synthetic construct
  source 1..20: mol_type = other RNA
agaatgaaataacttacgtg

SEQ ID NO: 3621 - RNA, 20 nt, synthetic construct
  source 1..20: mol_type = other RNA
agaattgaagtgttttgttt

SEQ ID NO: 3622 - RNA, 20 nt, synthetic construct
  source 1..20: mol_type = other RNA
ttctagaattgaagtgtttt

SEQ ID NO: 3623 - RNA, 20 nt, synthetic construct
  source 1..20: mol_type = other RNA
aaatatgtaacaacttcttg

SEQ ID NO: 3624 - RNA, 20 nt, synthetic construct
  source 1..20: mol_type = other RNA
tgccaagaaaataaccatga

SEQ ID NO: 3625 - RNA, 20 nt, synthetic construct
  source 1..20: mol_type = other RNA
tggcaagaagttgttacata

SEQ ID NO: 3626 - RNA, 20 nt, synthetic construct
  source 1..20: mol_type = other RNA
atggtgatgatgtggtctgt

SEQ ID NO: 3627 - RNA, 20 nt, synthetic construct
  source 1..20: mol_type = other RNA
atgtaatttgctgtgtgatt

SEQ ID NO: 3628 - RNA, 20 nt, synthetic construct
  source 1..20: mol_type = other RNA
tgccgtacaacgctgactcg

SEQ ID NO: 3629 - RNA, 20 nt, synthetic construct
  source 1..20: mol_type = other RNA
ttggtaatactggggagttc

SEQ ID NO: 3630 - RNA, 20 nt, synthetic construct
  source 1..20: mol_type = other RNA
gatcagacaccctttggtag

SEQ ID NO: 3631 - RNA, 20 nt, synthetic construct
  source 1..20: mol_type = other RNA
accaaagggtgtctgatcag

SEQ ID NO: 3632 - RNA, 20 nt, synthetic construct
  source 1..20: mol_type = other RNA
agtatcttcggcgcacatca

SEQ ID NO: 3633 - RNA, 20 nt, synthetic construct
  source 1..20: mol_type = other RNA
gcgcacatcagtgtatgggt

SEQ ID NO: 3634 - RNA, 20 nt, synthetic construct
  source 1..20: mol_type = other RNA
taatgtcttgttataaagca

SEQ ID NO: 3635 - RNA, 20 nt, synthetic construct
  source 1..20: mol_type = other RNA
tgtcttgacaatctaaaaca

SEQ ID NO: 3636 - RNA, 20 nt, synthetic construct
  source 1..20: mol_type = other RNA
atgctaagcagtactctaaa

SEQ ID NO: 3637 - RNA, 20 nt, synthetic construct
  source 1..20: mol_type = other RNA
gttgtgggcctagctggatc

SEQ ID NO: 3638 - RNA, 20 nt, synthetic construct
  source 1..20: mol_type = other RNA
aagtgagagatccagctagg

SEQ ID NO: 3639 - RNA, 20 nt, synthetic construct
  source 1..20: mol_type = other RNA
ctaattagtcacacctctac

SEQ ID NO: 3640 - RNA, 20 nt, synthetic construct
  source 1..20: mol_type = other RNA
cttatgtagaggtgtgacta

SEQ ID NO: 3641 - RNA, 20 nt, synthetic construct
  source 1..20: mol_type = other RNA
ttttcacttatgtagaggtg

SEQ ID NO: 3642 - RNA, 20 nt, synthetic construct
  source 1..20: mol_type = other RNA
gatttccttttcacttatgt

SEQ ID NO: 3643 - RNA, 20 nt, synthetic construct
  source 1..20: mol_type = other RNA
aaaactatttttaaggttca

SEQ ID NO: 3644 - RNA, 20 nt, synthetic construct
  source 1..20: mol_type = other RNA
atttcagtattcattacttt

SEQ ID NO: 3645 - RNA, 20 nt, synthetic construct
  source 1..20: mol_type = other RNA
gtattcattactttctctct

SEQ ID NO: 3646 - RNA, 20 nt, synthetic construct
  source 1..20: mol_type = other RNA
ttactttctctctgatgctc

SEQ ID NO: 3647 - RNA, 20 nt, synthetic construct
  source 1..20: mol_type = other RNA
ctctgatgctcatttcatcc

SEQ ID NO: 3648 - RNA, 20 nt, synthetic construct
  source 1..20: mol_type = other RNA
tccttttaacttactcccag

SEQ ID NO: 3649 - RNA, 20 nt, synthetic construct
  source 1..20: mol_type = other RNA
attagtttttttatttatcg

SEQ ID NO: 3650 - RNA, 20 nt, synthetic construct
  source 1..20: mol_type = other RNA
cctccaaagcattcatactc

SEQ ID NO: 3651 - RNA, 20 nt, synthetic construct
  source 1..20: mol_type = other RNA
tactccagggtctcgtcatt

SEQ ID NO: 3652 - RNA, 20 nt, synthetic construct
  source 1..20: mol_type = other RNA
tctataactgtgtcattaaa

SEQ ID NO: 3653 - RNA, 20 nt, synthetic construct
  source 1..20: mol_type = other RNA
ataactgtgtcattaaattt

SEQ ID NO: 3654 - RNA, 20 nt, synthetic construct
  source 1..20: mol_type = other RNA
ttttccacaccctctagaac

SEQ ID NO: 3655 - RNA, 20 nt, synthetic construct
  source 1..20: mol_type = other RNA
acaccctctagaacccagag

SEQ ID NO: 3656 - RNA, 20 nt, synthetic construct
  source 1..20: mol_type = other RNA
agagggtgtggaaaaggaaa

SEQ ID NO: 3657 - RNA, 20 nt, synthetic construct
  source 1..20: mol_type = other RNA
gccctcccctgctctccgtt

SEQ ID NO: 3658 - RNA, 20 nt, synthetic construct
  source 1..20: mol_type = other RNA
tgaggcagcacttactcact

SEQ ID NO: 3659 - RNA, 20 nt, synthetic construct
  source 1..20: mol_type = other RNA
ttaaggacaggcggtaagag

SEQ ID NO: 3660 - RNA, 20 nt, synthetic construct
  source 1..20: mol_type = other RNA
ttcattaaggacaggcggta

SEQ ID NO: 3661 - RNA, 20 nt, synthetic construct
  source 1..20: mol_type = other RNA
tagttttctgtgagggcaac

SEQ ID NO: 3662 - RNA, 20 nt, synthetic construct
  source 1..20: mol_type = other RNA
gtgagggcaaccttttttcg

SEQ ID NO: 3663 - RNA, 20 nt, synthetic construct
  source 1..20: mol_type = other RNA
tggggatcctccaccgccct

SEQ ID NO: 3664 - RNA, 20 nt, synthetic construct
  source 1..20: mol_type = other RNA
cccattttccccaacttcag

SEQ ID NO: 3665 - RNA, 20 nt, synthetic construct
  source 1..20: mol_type = other RNA
ccaacttcagaagaagaatc

SEQ ID NO: 3666 - RNA, 20 nt, synthetic construct
  source 1..20: mol_type = other RNA
gaagaagaatcttggcgagc

SEQ ID NO: 3667 - RNA, 20 nt, synthetic construct
  source 1..20: mol_type = other RNA
gaagttggggaaaatgggcg

SEQ ID NO: 3668 - RNA, 20 nt, synthetic construct
  source 1..20: mol_type = other RNA
tctgaagttggggaaaatgg

SEQ ID NO: 3669 - RNA, 20 nt, synthetic construct
  source 1..20: mol_type = other RNA
tcttctgaagttggggaaaa

SEQ ID NO: 3670 - RNA, 20 nt, synthetic construct
  source 1..20: mol_type = other RNA
tgaaactgtgtaaggctcca

SEQ ID NO: 3671 - RNA, 20 nt, synthetic construct
  source 1..20: mol_type = other RNA
ggaatggctcgccaagattc

SEQ ID NO: 3672 - RNA, 20 nt, synthetic construct
  source 1..20: mol_type = other RNA
ctggatgctaaacatggagc

SEQ ID NO: 3673 - RNA, 20 nt, synthetic construct
  source 1..20: mol_type = other RNA
acatagtttccctggatgct

SEQ ID NO: 3674 - RNA, 20 nt, synthetic construct
  source 1..20: mol_type = other RNA
tttcctcactcacttctttt

SEQ ID NO: 3675 - RNA, 20 nt, synthetic construct
  source 1..20: mol_type = other RNA
caaccattcatttcctcact

SEQ ID NO: 3676 - RNA, 20 nt, synthetic construct
  source 1..20: mol_type = other RNA
ggaagaaaaaaagttaccct

SEQ ID NO: 3677 - RNA, 20 nt, synthetic construct
  source 1..20: mol_type = other RNA
tgaaatttttcacaaccatt

SEQ ID NO: 3678 - RNA, 20 nt, synthetic construct
  source 1..20: mol_type = other RNA
tcctgaaatttttcacaacc

SEQ ID NO: 3679 - RNA, 20 nt, synthetic construct
  source 1..20: mol_type = other RNA
tcatatttaatggagcgtcc

SEQ ID NO: 3680 - RNA, 20 nt, synthetic construct
  source 1..20: mol_type = other RNA
cagtcaaacccaaatctcat

SEQ ID NO: 3681 - RNA, 20 nt, synthetic construct
  source 1..20: mol_type = other RNA
cctaatgagatttgggtttg

SEQ ID NO: 3682 - RNA, 20 nt, synthetic construct
  source 1..20: mol_type = other RNA
ctgttattctctaaagaaaa

SEQ ID NO: 3683 - RNA, 20 nt, synthetic construct
  source 1..20: mol_type = other RNA
ctaaagaaaaaaaaaaggaa

SEQ ID NO: 3684 - RNA, 20 nt, synthetic construct
  source 1..20: mol_type = other RNA
ttagagaataacagtgaaaa

SEQ ID NO: 3685 - RNA, 20 nt, synthetic construct
  source 1..20: mol_type = other RNA
ttttttttttctttagagaa

SEQ ID NO: 3686 - RNA, 20 nt, synthetic construct
  source 1..20: mol_type = other RNA
gatttgctctttttcctttt

SEQ ID NO: 3687 - RNA, 20 nt, synthetic construct
  source 1..20: mol_type = other RNA
ttacacttttcacagtagta

SEQ ID NO: 3688 - RNA, 20 nt, synthetic construct
  source 1..20: mol_type = other RNA
cagtagtacgcattacttcc

SEQ ID NO: 3689 - RNA, 20 nt, synthetic construct
  source 1..20: mol_type = other RNA
ttctagaacttctcctctaa

SEQ ID NO: 3690 - RNA, 20 nt, synthetic construct
  source 1..20: mol_type = other RNA
agaacttctcctctaacaaa

SEQ ID NO: 3691 - RNA, 20 nt, synthetic construct
  source 1..20: mol_type = other RNA
agaaggaagtaatgcgtact

SEQ ID NO: 3692 - RNA, 20 nt, synthetic construct
  source 1..20: mol_type = other RNA
cctctaacaaattggtccaa

SEQ ID NO: 3693 - RNA, 20 nt, synthetic construct
  source 1..20: mol_type = other RNA
ttggaccaatttgttagagg

SEQ ID NO: 3694 - RNA, 20 nt, synthetic construct
  source 1..20: mol_type = other RNA
aaactctgacaagaagtcac

SEQ ID NO: 3695 - RNA, 20 nt, synthetic construct
  source 1..20: mol_type = other RNA
tgtcagagtttggaaatttc

SEQ ID NO: 3696 - RNA, 20 nt, synthetic construct
  source 1..20: mol_type = other RNA
tggctctcaatctaggagtg

SEQ ID NO: 3697 - RNA, 20 nt, synthetic construct
  source 1..20: mol_type = other RNA
tcacgctcatatctgattag

SEQ ID NO: 3698 - RNA, 20 nt, synthetic construct
  source 1..20: mol_type = other RNA
cgctcatatctgattaggaa

SEQ ID NO: 3699 - RNA, 20 nt, synthetic construct
  source 1..20: mol_type = other RNA
taatcagatatgagcgtgaa

SEQ ID NO: 3700 - RNA, 20 nt, synthetic construct
  source 1..20: mol_type = other RNA
gttatttcctaatcagatat

SEQ ID NO: 3701 - RNA, 20 nt, synthetic construct
  source 1..20: mol_type = other RNA
attgttgattgtgggttttc

SEQ ID NO: 3702 - RNA, 20 nt, synthetic construct
  source 1..20: mol_type = other RNA
attatcataatacctaagct

SEQ ID NO: 3703 - RNA, 20 nt, synthetic construct
  source 1..20: mol_type = other RNA
taattgtcacaaagtggcat

SEQ ID NO: 3704 - RNA, 20 nt, synthetic construct
  source 1..20: mol_type = other RNA
taattttaggcaattcttaa

SEQ ID NO: 3705 - RNA, 20 nt, synthetic construct
  source 1..20: mol_type = other RNA
atgaatattttcttaagccc

SEQ ID NO: 3706 - RNA, 20 nt, synthetic construct
  source 1..20: mol_type = other RNA
ttgaaattcataattttagg

SEQ ID NO: 3707 - RNA, 20 nt, synthetic construct
  source 1..20: mol_type = other RNA
taagcccacaaagaaatttt

SEQ ID NO: 3708 - RNA, 20 nt, synthetic construct
  source 1..20: mol_type = other RNA
ttgtgggcttaagaaaatat

SEQ ID NO: 3709 - RNA, 20 nt, synthetic construct
  source 1..20: mol_type = other RNA
ccttctggaagtagaaagca

SEQ ID NO: 3710 - RNA, 20 nt, synthetic construct
  source 1..20: mol_type = other RNA
ggaagtagaaagcaaagaaa

SEQ ID NO: 3711 - RNA, 20 nt, synthetic construct
  source 1..20: mol_type = other RNA
agaaggagaaaaaatttctt

SEQ ID NO: 3712 - RNA, 20 nt, synthetic construct
  source 1..20: mol_type = other RNA
aagtctcttaacaaatgcaa

SEQ ID NO: 3713 - RNA, 20 nt, synthetic construct
  source 1..20: mol_type = other RNA
aaaggatgatcatttttcct

SEQ ID NO: 3714 - RNA, 20 nt, synthetic construct
  source 1..20: mol_type = other RNA
tgtgtcggtgatatcttcac

SEQ ID NO: 3715 - RNA, 20 nt, synthetic construct
  source 1..20: mol_type = other RNA
ctcacctgtgaggacagtct

SEQ ID NO: 3716 - RNA, 20 nt, synthetic construct
  source 1..20: mol_type = other RNA
gatcagagtagatgccctga

SEQ ID NO: 3717 - RNA, 20 nt, synthetic construct
  source 1..20: mol_type = other RNA
gggcatctactctgatcaga

SEQ ID NO: 3718 - RNA, 20 nt, synthetic construct
  source 1..20: mol_type = other RNA
taaaaatttggtctctcccc

SEQ ID NO: 3719 - RNA, 20 nt, synthetic construct
  source 1..20: mol_type = other RNA
gttggaatgaaaagttacag

SEQ ID NO: 3720 - RNA, 20 nt, synthetic construct
  source 1..20: mol_type = other RNA
aacagaaaatggggagagac

SEQ ID NO: 3721 - RNA, 20 nt, synthetic construct
  source 1..20: mol_type = other RNA
ttccaacagaaaatggggag

SEQ ID NO: 3722 - RNA, 20 nt, synthetic construct
  source 1..20: mol_type = other RNA
ggaggcatcacttaaaactg

SEQ ID NO: 3723 - RNA, 20 nt, synthetic construct
  source 1..20: mol_type = other RNA
gtatactcataagttcagga

SEQ ID NO: 3724 - RNA, 20 nt, synthetic construct
  source 1..20: mol_type = other RNA
ggtagtatcagctgtggtga

SEQ ID NO: 3725 - RNA, 20 nt, synthetic construct
  source 1..20: mol_type = other RNA
tgcacctcagcctcccgagt

SEQ ID NO: 3726 - RNA, 20 nt, synthetic construct
  source 1..20: mol_type = other RNA
ctctaactccctcaaactct

SEQ ID NO: 3727 - RNA, 20 nt, synthetic construct
  source 1..20: mol_type = other RNA
tccatctgatcaatgagact

SEQ ID NO: 3728 - RNA, 20 nt, synthetic construct
  source 1..20: mol_type = other RNA
ttactagtctcattgatcag

SEQ ID NO: 3729 - RNA, 20 nt, synthetic construct
  source 1..20: mol_type = other RNA
tatgcatcctgctgttctct

SEQ ID NO: 3730 - RNA, 20 nt, synthetic construct
  source 1..20: mol_type = other RNA
ctcacataaagttctttatt

SEQ ID NO: 3731 - RNA, 20 nt, synthetic construct
  source 1..20: mol_type = other RNA
ttattccacatcttgaaaat

SEQ ID NO: 3732 - RNA, 20 nt, synthetic construct
  source 1..20: mol_type = other RNA
acatcttgaaaatctatata

SEQ ID NO: 3733 - RNA, 20 nt, synthetic construct
  source 1..20: mol_type = other RNA
agatgtggaataaagaactt

SEQ ID NO: 3734 - RNA, 20 nt, synthetic construct
  source 1..20: mol_type = other RNA
tttaaaaacatttaattttt

SEQ ID NO: 3735 - RNA, 20 nt, synthetic construct
  source 1..20: mol_type = other RNA
gaatgtggtagaaagggaac

SEQ ID NO: 3736 - RNA, 20 nt, synthetic construct
  source 1..20: mol_type = other RNA
accacattcagaaattgcta

SEQ ID NO: 3737 - RNA, 20 nt, synthetic construct
  source 1..20: mol_type = other RNA
ctttctaccacattcagaaa

SEQ ID NO: 3738 - RNA, 20 nt, synthetic construct
  source 1..20: mol_type = other RNA
tgttccctttctaccacatt

SEQ ID NO: 3739 - RNA, 20 nt, synthetic construct
  source 1..20: mol_type = other RNA
ctattaggatgtggacattt

SEQ ID NO: 3740 - RNA, 20 nt, synthetic construct
  source 1..20: mol_type = other RNA
agtgaagtgagactagcttg

SEQ ID NO: 3741 - RNA, 20 nt, synthetic construct
  source 1..20: mol_type = other RNA
ttatttaaagacattagtga

SEQ ID NO: 3742 - RNA, 20 nt, synthetic construct
  source 1..20: mol_type = other RNA
ctaatgtctttaaataaaga

SEQ ID NO: 3743 - RNA, 20 nt, synthetic construct
  source 1..20: mol_type = other RNA
cctgaccctgtgccgatttc

SEQ ID NO: 3744 - RNA, 20 nt, synthetic construct
  source 1..20: mol_type = other RNA
tatcattcccctgaccctgt

SEQ ID NO: 3745 - RNA, 20 nt, synthetic construct
  source 1..20: mol_type = other RNA
aagaactaaaataagaatca

SEQ ID NO: 3746 - RNA, 20 nt, synthetic construct
  source 1..20: mol_type = other RNA
ttgaaatatttgttcatatc

SEQ ID NO: 3747 - RNA, 20 nt, synthetic construct
  source 1..20: mol_type = other RNA
tattttagttctttgaaata

SEQ ID NO: 3748 - RNA, 20 nt, synthetic construct
  source 1..20: mol_type = other RNA
aaataattaagatgagcaaa

SEQ ID NO: 3749 - RNA, 20 nt, synthetic construct
  source 1..20: mol_type = other RNA
taggaattgaatgactattc

SEQ ID NO: 3750 - RNA, 20 nt, synthetic construct
  source 1..20: mol_type = other RNA
taggaatttgctcatcttaa

SEQ ID NO: 3751 - RNA, 20 nt, synthetic construct
  source 1..20: mol_type = other RNA
attcctaggaatttgctcat

SEQ ID NO: 3752 - RNA, 20 nt, synthetic construct
  source 1..20: mol_type = other RNA
caacattctaatgatttgaa

SEQ ID NO: 3753 - RNA, 20 nt, synthetic construct
  source 1..20: mol_type = other RNA
cccagtaactcttgagattt

SEQ ID NO: 3754 - RNA, 20 nt, synthetic construct
  source 1..20: mol_type = other RNA
aaaaattctcaggtacatag

SEQ ID NO: 3755 - RNA, 20 nt, synthetic construct
  source 1..20: mol_type = other RNA
caggtacatagtactgcagc

SEQ ID NO: 3756 - RNA, 20 nt, synthetic construct
  source 1..20: mol_type = other RNA
attaaatgtccaaagagaga

SEQ ID NO: 3757 - RNA, 20 nt, synthetic construct
  source 1..20: mol_type = other RNA
gtggatgatgacacagacaa

SEQ ID NO: 3758 - RNA, 20 nt, synthetic construct
  source 1..20: mol_type = other RNA
gtgcagtcattactttcagt

SEQ ID NO: 3759 - RNA, 20 nt, synthetic construct
  source 1..20: mol_type = other RNA
tttctgtgcagtcattactt

SEQ ID NO: 3760 - RNA, 20 nt, synthetic construct
  source 1..20: mol_type = other RNA
agcttgatatgtttcttttc

SEQ ID NO: 3761 - RNA, 20 nt, synthetic construct
  source 1..20: mol_type = other RNA
ctacaggaaataagcgtagc

SEQ ID NO: 3762 - RNA, 20 nt, synthetic construct
  source 1..20: mol_type = other RNA
tgtagagaacctggtattac

SEQ ID NO: 3763 - RNA, 20 nt, synthetic construct
  source 1..20: mol_type = other RNA
atgtgtactgggctacgctt

SEQ ID NO: 3764 - RNA, 20 nt, synthetic construct
  source 1..20: mol_type = other RNA
aaaatactaaaactgtcagt

SEQ ID NO: 3765 - RNA, 20 nt, synthetic construct
  source 1..20: mol_type = other RNA
ataaagttactgacagtttt

SEQ ID NO: 3766 - RNA, 20 nt, synthetic construct
  source 1..20: mol_type = other RNA
aaaatcacattaggtcaagt

SEQ ID NO: 3767 - RNA, 20 nt, synthetic construct
  source 1..20: mol_type = other RNA
ggagctactaaagaattgca

SEQ ID NO: 3768 - RNA, 20 nt, synthetic construct
  source 1..20: mol_type = other RNA
ttagtagctcctgaaatgtg

SEQ ID NO: 3769 - RNA, 20 nt, synthetic construct
  source 1..20: mol_type = other RNA
atcctttttggtacgataga

SEQ ID NO: 3770 - RNA, 20 nt, synthetic construct
  source 1..20: mol_type = other RNA
tttttctatcctttttggta

SEQ ID NO: 3771 - RNA, 20 nt, synthetic construct
  source 1..20: mol_type = other RNA
agcagctgtatatgcaacct

SEQ ID NO: 3772 - RNA, 20 nt, synthetic construct
  source 1..20: mol_type = other RNA
tataacaagttgcaccacca

SEQ ID NO: 3773 - RNA, 20 nt, synthetic construct
  source 1..20: mol_type = other RNA
cagccccacaaaccctgaac

SEQ ID NO: 3774 - RNA, 20 nt, synthetic construct
  source 1..20: mol_type = other RNA
gggtttgtggggctgagaaa

SEQ ID NO: 3775 - RNA, 20 nt, synthetic construct
  source 1..20: mol_type = other RNA
cccagtggatagcaggtcca

SEQ ID NO: 3776 - RNA, 20 nt, synthetic construct
  source 1..20: mol_type = other RNA
agtaccttcccccagtggat

SEQ ID NO: 3777 - RNA, 20 nt, synthetic construct
  source 1..20: mol_type = other RNA
tctcttttccagtaccttcc

SEQ ID NO: 3778 - RNA, 20 nt, synthetic construct
  source 1..20: mol_type = other RNA
attcctctcttttccagtac

SEQ ID NO: 3779 - RNA, 20 nt, synthetic construct
  source 1..20: mol_type = other RNA
cctctgctgtttctattcct

SEQ ID NO: 3780 - RNA, 20 nt, synthetic construct
  source 1..20: mol_type = other RNA
tctcctctgctgtttctatt

SEQ ID NO: 3781 - RNA, 20 nt, synthetic construct
  source 1..20: mol_type = other RNA
taacatgctggatgggtaaa

SEQ ID NO: 3782 - RNA, 20 nt, synthetic construct
  source 1..20: mol_type = other RNA
tgaagtacctctgcagatgc

SEQ ID NO: 3783 - RNA, 20 nt, synthetic construct
  source 1..20: mol_type = other RNA
tgaacataggttttgccagc

SEQ ID NO: 3784 - RNA, 20 nt, synthetic construct
  source 1..20: mol_type = other RNA
acaaatattgattaaatacc

SEQ ID NO: 3785 - RNA, 20 nt, synthetic construct
  source 1..20: mol_type = other RNA
atctgccaggcactgtgcat

SEQ ID NO: 3786 - RNA, 20 nt, synthetic construct
  source 1..20: mol_type = other RNA
tggtaatcacttcgtagact

SEQ ID NO: 3787 - RNA, 20 nt, synthetic construct
  source 1..20: mol_type = other RNA
ttttagagaaggtaacattc

SEQ ID NO: 3788 - RNA, 20 nt, synthetic construct
  source 1..20: mol_type = other RNA
ctaaaaggaattacaatatg

SEQ ID NO: 3789 - RNA, 20 nt, synthetic construct
  source 1..20: mol_type = other RNA
acatggcacttcttcaagtg

SEQ ID NO: 3790 - RNA, 20 nt, synthetic construct
  source 1..20: mol_type = other RNA
tcaagtggaaaaggatactg

SEQ ID NO: 3791 - RNA, 20 nt, synthetic construct
  source 1..20: mol_type = other RNA
agtggaaaaggatactgtaa

SEQ ID NO: 3792 - RNA, 20 nt, synthetic construct
  source 1..20: mol_type = other RNA
acttgaagaagtgccatgtt

SEQ ID NO: 3793 - RNA, 20 nt, synthetic construct
  source 1..20: mol_type = other RNA
aagtgtaaaattacagtatc

SEQ ID NO: 3794 - RNA, 20 nt, synthetic construct
  source 1..20: mol_type = other RNA
ttaacatcagacatatactt

SEQ ID NO: 3795 - RNA, 20 nt, synthetic construct
  source 1..20: mol_type = other RNA
aagacctaattaacaccgaa

SEQ ID NO: 3796 - RNA, 20 nt, synthetic construct
  source 1..20: mol_type = other RNA
gtgttaattaggtcttagaa

SEQ ID NO: 3797 - RNA, 20 nt, synthetic construct
  source 1..20: mol_type = other RNA
aacttatgagagcccacatt

SEQ ID NO: 3798 - RNA, 20 nt, synthetic construct
  source 1..20: mol_type = other RNA
aacctattttttcagtgact

SEQ ID NO: 3799 - RNA, 20 nt, synthetic construct
  source 1..20: mol_type = other RNA
cagtaaaaagtagcattcca

SEQ ID NO: 3800 - RNA, 20 nt, synthetic construct
  source 1..20: mol_type = other RNA
agttgcttggtagttattct

SEQ ID NO: 3801 - RNA, 20 nt, synthetic construct
  source 1..20: mol_type = other RNA
taatatattcagtatattag

SEQ ID NO: 3802 - RNA, 20 nt, synthetic construct
  source 1..20: mol_type = other RNA
gtatattagagtgatactat

SEQ ID NO: 3803 - RNA, 20 nt, synthetic construct
  source 1..20: mol_type = other RNA
aaaaaaattaagttcatcaa

SEQ ID NO: 3804 - RNA, 20 nt, synthetic construct
  source 1..20: mol_type = other RNA
tcaacgtctagaaaacctac

SEQ ID NO: 3805 - RNA, 20 nt, synthetic construct
  source 1..20: mol_type = other RNA
agacgttgatgaacttaatt

SEQ ID NO: 3806 - RNA, 20 nt, synthetic construct
  source 1..20: mol_type = other RNA
atgcatcaccagcctgaccc

SEQ ID NO: 3807 - RNA, 20 nt, synthetic construct
  source 1..20: mol_type = other RNA
tttataataatttgaagatt

SEQ ID NO: 3808 - RNA, 20 nt, synthetic construct
  source 1..20: mol_type = other RNA
aattattataaaagaactgc

SEQ ID NO: 3809 - RNA, 20 nt, synthetic construct
  source 1..20: mol_type = other RNA
aatcttcaaattattataaa

SEQ ID NO: 3810 - RNA, 20 nt, synthetic construct
  source 1..20: mol_type = other RNA
ccttcaaatcttcaaattat

SEQ ID NO: 3811 - RNA, 20 nt, synthetic construct
  source 1..20: mol_type = other RNA
taggctgccaatcggctatt

SEQ ID NO: 3812 - RNA, 20 nt, synthetic construct
  source 1..20: mol_type = other RNA
ctgtactacacctagaaaca

SEQ ID NO: 3813 - RNA, 20 nt, synthetic construct
  source 1..20: mol_type = other RNA
aggtgtagtacagcgaatag

SEQ ID NO: 3814 - RNA, 20 nt, synthetic construct
  source 1..20: mol_type = other RNA
acaatgaataatctacttaa

SEQ ID NO: 3815 - RNA, 20 nt, synthetic construct
  source 1..20: mol_type = other RNA
ttgttgaaattgacttgtgt

SEQ ID NO: 3816 - RNA, 20 nt, synthetic construct
  source 1..20: mol_type = other RNA
actgttgatttagtttaatg

SEQ ID NO: 3817 - RNA, 20 nt, synthetic construct
  source 1..20: mol_type = other RNA
tttcaactgttgatttagtt

SEQ ID NO: 3818 - RNA, 20 nt, synthetic construct
  source 1..20: mol_type = other RNA
actttcatttcaactgttga

SEQ ID NO: 3819 - RNA, 20 nt, synthetic construct
  source 1..20: mol_type = other RNA
tcaaacatacttaagtcagg

SEQ ID NO: 3820 - RNA, 20 nt, synthetic construct
  source 1..20: mol_type = other RNA
taggatgacagcgataaaat

SEQ ID NO: 3821 - RNA, 20 nt, synthetic construct
  source 1..20: mol_type = other RNA
tttgctgccatcctaagatc

SEQ ID NO: 3822 - RNA, 20 nt, synthetic construct
  source 1..20: mol_type = other RNA
gggttttacagctttctttt

SEQ ID NO: 3823 - RNA, 20 nt, synthetic construct
  source 1..20: mol_type = other RNA
taaccagtgatccctcagta

SEQ ID NO: 3824 - RNA, 20 nt, synthetic construct
  source 1..20: mol_type = other RNA
gtgtatccttcctaaccagt

SEQ ID NO: 3825 - RNA, 20 nt, synthetic construct
  source 1..20: mol_type = other RNA
ctcagaggttggctatcctc

SEQ ID NO: 3826 - RNA, 20 nt, synthetic construct
  source 1..20: mol_type = other RNA
ctaagtgtttcactcagagg

SEQ ID NO: 3827 - RNA, 20 nt, synthetic construct
  source 1..20: mol_type = other RNA
tatctgaacttcagggttgc

SEQ ID NO: 3828 - RNA, 20 nt, synthetic construct
  source 1..20: mol_type = other RNA
gataagaagcaaaggacagt

SEQ ID NO: 3829 - RNA, 20 nt, synthetic construct
  source 1..20: mol_type = other RNA
gggttgcaaaggacagtaag

SEQ ID NO: 3830 - RNA, 20 nt, synthetic construct
  source 1..20: mol_type = other RNA
tactgtcctttgcaaccctg

SEQ ID NO: 3831 - RNA, 20 nt, synthetic construct
  source 1..20: mol_type = other RNA
tttcttactgtcctttgcaa

SEQ ID NO: 3832 - RNA, 20 nt, synthetic construct
  source 1..20: mol_type = other RNA
gtgtattttaaatctctttc

SEQ ID NO: 3833 - RNA, 20 nt, synthetic construct
  source 1..20: mol_type = other RNA
tccttgaaggttttggtggg

SEQ ID NO: 3834 - RNA, 20 nt, synthetic construct
  source 1..20: mol_type = other RNA
ttgaaggttttggtgggaaa

SEQ ID NO: 3835 - RNA, 20 nt, synthetic construct
  source 1..20: mol_type = other RNA
aggaagaaagagatttaaaa

SEQ ID NO: 3836 - RNA, 20 nt, synthetic construct
  source 1..20: mol_type = other RNA
caccaaaaccttcaaggaag

SEQ ID NO: 3837 - RNA, 20 nt, synthetic construct
  source 1..20: mol_type = other RNA
cagtcttttcccaccaaaac

SEQ ID NO: 3838 - RNA, 20 nt, synthetic construct
  source 1..20: mol_type = other RNA
gtacaatggggagggatgaa

SEQ ID NO: 3839 - RNA, 20 nt, synthetic construct
  source 1..20: mol_type = other RNA
tccctccccattgtactgaa

SEQ ID NO: 3840 - RNA, 20 nt, synthetic construct
  source 1..20: mol_type = other RNA
ttttttaatcaaggcactgt

SEQ ID NO: 3841 - RNA, 20 nt, synthetic construct
  source 1..20: mol_type = other RNA
tacctaaaacagattttgct

SEQ ID NO: 3842 - RNA, 20 nt, synthetic construct
  source 1..20: mol_type = other RNA
ctacttaaagttgcctcatt

SEQ ID NO: 3843 - RNA, 20 nt, synthetic construct
  source 1..20: mol_type = other RNA
acaaaatactgcttattatg

SEQ ID NO: 3844 - RNA, 20 nt, synthetic construct
  source 1..20: mol_type = other RNA
ataaccactgaaattgtaca

SEQ ID NO: 3845 - RNA, 20 nt, synthetic construct
  source 1..20: mol_type = other RNA
gtggttattgaaatggacaa

SEQ ID NO: 3846 - RNA, 20 nt, synthetic construct
  source 1..20: mol_type = other RNA
tgtacaatttcagtggttat

SEQ ID NO: 3847 - RNA, 20 nt, synthetic construct
  source 1..20: mol_type = other RNA
ctataaacagcaaatagttt

SEQ ID NO: 3848 - RNA, 20 nt, synthetic construct
  source 1..20: mol_type = other RNA
tcaggattactcaattaact

SEQ ID NO: 3849 - RNA, 20 nt, synthetic construct
  source 1..20: mol_type = other RNA
ggattactcaattaactctg

SEQ ID NO: 3850 - RNA, 20 nt, synthetic construct
  source 1..20: mol_type = other RNA
tgagaaaggaacaaagttag

SEQ ID NO: 3851 - RNA, 20 nt, synthetic construct
  source 1..20: mol_type = other RNA
catgaaaaccagagttaatt

SEQ ID NO: 3852 - RNA, 20 nt, synthetic construct
  source 1..20: mol_type = other RNA
tttctcatgaaaaccagagt

SEQ ID NO: 3853 - RNA, 20 nt, synthetic construct
  source 1..20: mol_type = other RNA
tttgctccaaatctaactaa

SEQ ID NO: 3854 - RNA, 20 nt, synthetic construct
  source 1..20: mol_type = other RNA
tcctacctccaagagtataa

SEQ ID NO: 3855 - RNA, 20 nt, synthetic construct
  source 1..20: mol_type = other RNA
aatttgtacccataaaacta

SEQ ID NO: 3856 - RNA, 20 nt, synthetic construct
  source 1..20: mol_type = other RNA
aaaattactactgtaataaa

SEQ ID NO: 3857 - RNA, 20 nt, synthetic construct
  source 1..20: mol_type = other RNA
tcatttagtggataatatag

SEQ ID NO: 3858 - RNA, 20 nt, synthetic construct
  source 1..20: mol_type = other RNA
tttagtggataatataggat

SEQ ID NO: 3859 - RNA, 20 nt, synthetic construct
  source 1..20: mol_type = other RNA
atctgtgagtctgtgtatcc

SEQ ID NO: 3860 - RNA, 20 nt, synthetic construct
  source 1..20: mol_type = other RNA
gtcccaaaagattttgttaa

SEQ ID NO: 3861 - RNA, 20 nt, synthetic construct
  source 1..20: mol_type = other RNA
aattagaatttttaccaaaa

SEQ ID NO: 3862 - RNA, 20 nt, synthetic construct
  source 1..20: mol_type = other RNA
aatttgaaacttcagtccca

SEQ ID NO: 3863 - RNA, 20 nt, synthetic construct
  source 1..20: mol_type = other RNA
gttttggtaaaaattctaat

SEQ ID NO: 3864 - RNA, 20 nt, synthetic construct
  source 1..20: mol_type = other RNA
atactttggatgaaagtcct

SEQ ID NO: 3865 - RNA, 20 nt, synthetic construct
  source 1..20: mol_type = other RNA
tccaaagtatggaaaatgca

SEQ ID NO: 3866 - RNA, 20 nt, synthetic construct
  source 1..20: mol_type = other RNA
ccagctggcagtgccgccat

SEQ ID NO: 3867 - RNA, 20 nt, synthetic construct
  source 1..20: mol_type = other RNA
agaagctcggaaaaggaagt

SEQ ID NO: 3868 - RNA, 20 nt, synthetic construct
  source 1..20: mol_type = other RNA
agaattattttaaatagtca

SEQ ID NO: 3869 - RNA, 20 nt, synthetic construct
  source 1..20: mol_type = other RNA
gagcttctagaattatttta

SEQ ID NO: 3870 - RNA, 20 nt, synthetic construct
  source 1..20: mol_type = other RNA
ttttccgagcttctagaatt

SEQ ID NO: 3871 - RNA, 20 nt, synthetic construct
  source 1..20: mol_type = other RNA
tcactcattaaaccattgtt

SEQ ID NO: 3872 - RNA, 20 nt, synthetic construct
  source 1..20: mol_type = other RNA
aggttcatcactcattaaac

SEQ ID NO: 3873 - RNA, 20 nt, synthetic construct
  source 1..20: mol_type = other RNA
tgttgaagatgaacacatat

SEQ ID NO: 3874 - RNA, 20 nt, synthetic construct
  source 1..20: mol_type = other RNA
acatgaatattatgctctat

SEQ ID NO: 3875 - RNA, 20 nt, synthetic construct
  source 1..20: mol_type = other RNA
tcttcaacatgaatattatg

SEQ ID NO: 3876 - RNA, 20 nt, synthetic construct
  source 1..20: mol_type = other RNA
aagatcctatcttgcacttt

SEQ ID NO: 3877 - RNA, 20 nt, synthetic construct
  source 1..20: mol_type = other RNA
ctgtattgtaagcccataaa

SEQ ID NO: 3878 - RNA, 20 nt, synthetic construct
  source 1..20: mol_type = other RNA
ctttagaaacagaagtgcca

SEQ ID NO: 3879 - RNA, 20 nt, synthetic construct
  source 1..20: mol_type = other RNA
aaagtgaaagcttgactcct

SEQ ID NO: 3880 - RNA, 20 nt, synthetic construct
  source 1..20: mol_type = other RNA
gtttctaaagtgaaagcttg

SEQ ID NO: 3881 - RNA, 20 nt, synthetic construct
  source 1..20: mol_type = other RNA
gccttgtggtgtccttggca

SEQ ID NO: 3882 - RNA, 20 nt, synthetic construct
  source 1..20: mol_type = other RNA
ctctctggttaagaatcact

SEQ ID NO: 3883 - RNA, 20 nt, synthetic construct
  source 1..20: mol_type = other RNA
taaccagagagagaaaggca

SEQ ID NO: 3884 - RNA, 20 nt, synthetic construct
  source 1..20: mol_type = other RNA
atgtatccccagtagccaag

SEQ ID NO: 3885 - RNA, 20 nt, synthetic construct
  source 1..20: mol_type = other RNA
tggctactggggatacatag

SEQ ID NO: 3886 - RNA, 20 nt, synthetic construct
  source 1..20: mol_type = other RNA
tttgtcttctgaatacaatt

SEQ ID NO: 3887 - RNA, 20 nt, synthetic construct
  source 1..20: mol_type = other RNA
cctagggtacacatgtaatt

SEQ ID NO: 3888 - RNA, 20 nt, synthetic construct
  source 1..20: mol_type = other RNA
gatgagaatcacccttaaaa

SEQ ID NO: 3889 - RNA, 20 nt, synthetic construct
  source 1..20: mol_type = other RNA
catctgaagaggcagcccct

SEQ ID NO: 3890 - RNA, 20 nt, synthetic construct
  source 1..20: mol_type = other RNA
tttaagggtgattctcatct

SEQ ID NO: 3891 - RNA, 20 nt, synthetic construct
  source 1..20: mol_type = other RNA
tactgtgtgaagggtcaatt

SEQ ID NO: 3892 - RNA, 20 nt, synthetic construct
  source 1..20: mol_type = other RNA
cacagtaggaaattgtccgt

SEQ ID NO: 3893 - RNA, 20 nt, synthetic construct
  source 1..20: mol_type = other RNA
atggaacacttggcatctat

SEQ ID NO: 3894 - RNA, 20 nt, synthetic construct
  source 1..20: mol_type = other RNA
atggaaaattgacccttcac

SEQ ID NO: 3895 - RNA, 20 nt, synthetic construct
  source 1..20: mol_type = other RNA
cacttacacacagtactggc

SEQ ID NO: 3896 - RNA, 20 nt, synthetic construct
  source 1..20: mol_type = other RNA
gtgctcggttattgccagta

SEQ ID NO: 3897 - RNA, 20 nt, synthetic construct
  source 1..20: mol_type = other RNA
tcagtgctcggttattgcca

SEQ ID NO: 3898 - RNA, 20 nt, synthetic construct
  source 1..20: mol_type = other RNA
ttttctgccccacagagtga

SEQ ID NO: 3899 - RNA, 20 nt, synthetic construct
  source 1..20: mol_type = other RNA
gccccacagagtgaaagaag

SEQ ID NO: 3900 - RNA, 20 nt, synthetic construct
  source 1..20: mol_type = other RNA
ctctgtggggcagaaaagga

SEQ ID NO: 3901 - RNA, 20 nt, synthetic construct
  source 1..20: mol_type = other RNA
ttcactctgtggggcagaaa

SEQ ID NO: 3902 - RNA, 20 nt, synthetic construct
  source 1..20: mol_type = other RNA
ctggtctcacattcagctgt

SEQ ID NO: 3903 - RNA, 20 nt, synthetic construct
  source 1..20: mol_type = other RNA
gctgtacgattaggttcaaa

SEQ ID NO: 3904 - RNA, 20 nt, synthetic construct
  source 1..20: mol_type = other RNA
aagttatccagccaagtaat

SEQ ID NO: 3905 - RNA, 20 nt, synthetic construct
  source 1..20: mol_type = other RNA
agcatcgtagctgggctgat

SEQ ID NO: 3906 - RNA, 20 nt, synthetic construct
  source 1..20: mol_type = other RNA
gaagctaagaaggaaaaaaa

SEQ ID NO: 3907 - RNA, 20 nt, synthetic construct
  source 1..20: mol_type = other RNA
gaaatggagcagttaaggat

SEQ ID NO: 3908 - RNA, 20 nt, synthetic construct
  source 1..20: mol_type = other RNA
tagcttcagaaatggagcag

SEQ ID NO: 3909 - RNA, 20 nt, synthetic construct
  source 1..20: mol_type = other RNA
ttcttagcttcagaaatgga

SEQ ID NO: 3910 - RNA, 20 nt, synthetic construct
  source 1..20: mol_type = other RNA
ttgtaatggatttttttttt

SEQ ID NO: 3911 - RNA, 20 nt, synthetic construct
  source 1..20: mol_type = other RNA
ttctttgtaatggatttttt

SEQ ID NO: 3912 - RNA, 20 nt, synthetic construct
  source 1..20: mol_type = other RNA
cctgcctcagcctcccgagt

SEQ ID NO: 3913 - RNA, 20 nt, synthetic construct
  source 1..20: mol_type = other RNA
agcaattctcctgcctcagc

SEQ ID NO: 3914 - RNA, 20 nt, synthetic construct
  source 1..20: mol_type = other RNA
tgggttcaagcaattctcct

SEQ ID NO: 3915 - RNA, 20 nt, synthetic construct
  source 1..20: mol_type = other RNA
taagtgtctgtcaaaaacag

SEQ ID NO: 3916 - RNA, 20 nt, synthetic construct
  source 1..20: mol_type = other RNA
tcagtttcgtaagtgtctgt

SEQ ID NO: 3917 - RNA, 20 nt, synthetic construct
  source 1..20: mol_type = other RNA
tttagacttaggtgctggga

SEQ ID NO: 3918 - RNA, 20 nt, synthetic construct
  source 1..20: mol_type = other RNA
cagcacctaagtctaaaaga

SEQ ID NO: 3919 - RNA, 20 nt, synthetic construct
  source 1..20: mol_type = other RNA
tttgagaaactattctattt

SEQ ID NO: 3920 - RNA, 20 nt, synthetic construct
  source 1..20: mol_type = other RNA
caaaagaagcaaatctcttt

SEQ ID NO: 3921 - RNA, 20 nt, synthetic construct
  source 1..20: mol_type = other RNA
atttcttcttacagggtatt

SEQ ID NO: 3922 - RNA, 20 nt, synthetic construct
  source 1..20: mol_type = other RNA
tcttacagggtatttgaaca

SEQ ID NO: 3923 - RNA, 20 nt, synthetic construct
  source 1..20: mol_type = other RNA
tacagggtatttgaacaact

SEQ ID NO: 3924 - RNA, 20 nt, synthetic construct
  source 1..20: mol_type = other RNA
aataccctgtaagaagaaat

SEQ ID NO: 3925 - RNA, 20 nt, synthetic construct
  source 1..20: mol_type = other RNA
tttttacctctggccttcag

SEQ ID NO: 3926 - RNA, 20 nt, synthetic construct
  source 1..20: mol_type = other RNA
gaggtattttttttcctcct

SEQ ID NO: 3927 - RNA, 20 nt, synthetic construct
  source 1..20: mol_type = other RNA
tcctggtcttgacgttcttt

SEQ ID NO: 3928 - RNA, 20 nt, synthetic construct
  source 1..20: mol_type = other RNA
ttaccaattgctatttttgt

SEQ ID NO: 3929 - RNA, 20 nt, synthetic construct
  source 1..20: mol_type = other RNA
tgtaagctgaagcaaattct

SEQ ID NO: 3930 - RNA, 20 nt, synthetic construct
  source 1..20: mol_type = other RNA
gcttacaggaaattaataaa

SEQ ID NO: 3931 - RNA, 20 nt, synthetic construct
  source 1..20: mol_type = other RNA
ttgtgaagagcggagaataa

SEQ ID NO: 3932 - RNA, 20 nt, synthetic construct
  source 1..20: mol_type = other RNA
caaagaatttgcttcagctt

SEQ ID NO: 3933 - RNA, 20 nt, synthetic construct
  source 1..20: mol_type = other RNA
ccgctcttcacaaagaattt

SEQ ID NO: 3934 - RNA, 20 nt, synthetic construct
  source 1..20: mol_type = other RNA
gatcatgagtttgttattct

SEQ ID NO: 3935 - RNA, 20 nt, synthetic construct
  source 1..20: mol_type = other RNA
aaagtacatttacattattt

SEQ ID NO: 3936 - RNA, 20 nt, synthetic construct
  source 1..20: mol_type = other RNA
ctccggtgtagtctgttata

SEQ ID NO: 3937 - RNA, 20 nt, synthetic construct
  source 1..20: mol_type = other RNA
caatagtttcgtatcagtgt

SEQ ID NO: 3938 - RNA, 20 nt, synthetic construct
  source 1..20: mol_type = other RNA
tatcagtgtaattaaaatat

SEQ ID NO: 3939 - RNA, 20 nt, synthetic construct
  source 1..20: mol_type = other RNA
caattcattaatgactggtt

SEQ ID NO: 3940 - RNA, 20 nt, synthetic construct
  source 1..20: mol_type = other RNA
ttaatgactggttatgtaac

SEQ ID NO: 3941 - RNA, 20 nt, synthetic construct
  source 1..20: mol_type = other RNA
ccagcccctctcccctacat

SEQ ID NO: 3942 - RNA, 20 nt, synthetic construct
  source 1..20: mol_type = other RNA
gttttttagactgttatctc

SEQ ID NO: 3943 - RNA, 20 nt, synthetic construct
  source 1..20: mol_type = other RNA
gttactaataagaggctgat

SEQ ID NO: 3944 - RNA, 20 nt, synthetic construct
  source 1..20: mol_type = other RNA
aatcagcctcttattagtaa

SEQ ID NO: 3945 - RNA, 20 nt, synthetic construct
  source 1..20: mol_type = other RNA
ttgtaagaacaaattcataa

SEQ ID NO: 3946 - RNA, 20 nt, synthetic construct
  source 1..20: mol_type = other RNA
tacaaggaaaatgcttttta

SEQ ID NO: 3947 - RNA, 20 nt, synthetic construct
  source 1..20: mol_type = other RNA
taaaacaagtgagcaagata

SEQ ID NO: 3948 - RNA, 20 nt, synthetic construct
  source 1..20: mol_type = other RNA
atattttagcaagaagcata

SEQ ID NO: 3949 - RNA, 20 nt, synthetic construct
  source 1..20: mol_type = other RNA
tgctaaaatatggaatttga

SEQ ID NO: 3950 - RNA, 20 nt, synthetic construct
  source 1..20: mol_type = other RNA
gttactatatctgtattagt

SEQ ID NO: 3951 - RNA, 20 nt, synthetic construct
  source 1..20: mol_type = other RNA
ctctctttacaccgttattt

SEQ ID NO: 3952 - RNA, 20 nt, synthetic construct
  source 1..20: mol_type = other RNA
cttttaacttttagttttct

SEQ ID NO: 3953 - RNA, 20 nt, synthetic construct
  source 1..20: mol_type = other RNA
aacttctaaaatgcttacta

SEQ ID NO: 3954 - RNA, 20 nt, synthetic construct
  source 1..20: mol_type = other RNA
aaaatgcttactatagtatt

SEQ ID NO: 3955 - RNA, 20 nt, synthetic construct
  source 1..20: mol_type = other RNA
aatactatagtaagcatttt

SEQ ID NO: 3956 - RNA, 20 nt, synthetic construct
  source 1..20: mol_type = other RNA
atatgtttgtgtatatgcgt

SEQ ID NO: 3957 - RNA, 20 nt, synthetic construct
  source 1..20: mol_type = other RNA
tttaatcctcagactggcct

SEQ ID NO: 3958 - RNA, 20 nt, synthetic construct
  source 1..20: mol_type = other RNA
gcttaaatcttgatggtaaa

SEQ ID NO: 3959 - RNA, 20 nt, synthetic construct
  source 1..20: mol_type = other RNA
gccaaaacttaaaaattatg

SEQ ID NO: 3960 - RNA, 20 nt, synthetic construct
  source 1..20: mol_type = other RNA
tagacatctggaatgttaaa

SEQ ID NO: 3961 - RNA, 20 nt, synthetic construct
  source 1..20: mol_type = other RNA
agatgtctaagaaagaagtc

SEQ ID NO: 3962 - RNA, 20 nt, synthetic construct
  source 1..20: mol_type = other RNA
gttttaacattccagatgtc

SEQ ID NO: 3963 - RNA, 20 nt, synthetic construct
  source 1..20: mol_type = other RNA
aaataatatttatgtagaag

SEQ ID NO: 3964 - RNA, 20 nt, synthetic construct
  source 1..20: mol_type = other RNA
acataaatattattttgaaa

SEQ ID NO: 3965 - RNA, 20 nt, synthetic construct
  source 1..20: mol_type = other RNA
ggcccctgtatcccggcttc

SEQ ID NO: 3966 - RNA, 20 nt, synthetic construct
  source 1..20: mol_type = other RNA
tgactttttttaatacctct

SEQ ID NO: 3967 - RNA, 20 nt, synthetic construct
  source 1..20: mol_type = other RNA
ttgatccattcttgactttt

SEQ ID NO: 3968 - RNA, 20 nt, synthetic construct
  source 1..20: mol_type = other RNA
ctctggtttctttgatccat

SEQ ID NO: 3969 - RNA, 20 nt, synthetic construct
  source 1..20: mol_type = other RNA
aattttccctctggtttctt

SEQ ID NO: 3970 - RNA, 20 nt, synthetic construct
  source 1..20: mol_type = other RNA
tttgtcttaatatattttct

SEQ ID NO: 3971 - RNA, 20 nt, synthetic construct
  source 1..20: mol_type = other RNA
tttgatatttcccataattt

SEQ ID NO: 3972 - RNA, 20 nt, synthetic construct
  source 1..20: mol_type = other RNA
atctcataacacttcttttg

SEQ ID NO: 3973 - RNA, 20 nt, synthetic construct
  source 1..20: mol_type = other RNA
aaaaaccagctcctcgattc

SEQ ID NO: 3974 - RNA, 20 nt, synthetic construct
  source 1..20: mol_type = other RNA
ctgattttttgaagggttct

SEQ ID NO: 3975 - RNA, 20 nt, synthetic construct
  source 1..20: mol_type = other RNA
aaaaatcagtgaatcgagga

SEQ ID NO: 3976 - RNA, 20 nt, synthetic construct
  source 1..20: mol_type = other RNA
tcgtgtctctatcttcttca

SEQ ID NO: 3977 - RNA, 20 nt, synthetic construct
  source 1..20: mol_type = other RNA
tgtctctatcttcttcagtt

SEQ ID NO: 3978 - RNA, 20 nt, synthetic construct
  source 1..20: mol_type = other RNA
tcagttctgctctgatctta

SEQ ID NO: 3979 - RNA, 20 nt, synthetic construct
  source 1..20: mol_type = other RNA
gttctgctctgatcttagtt

SEQ ID NO: 3980 - RNA, 20 nt, synthetic construct
  source 1..20: mol_type = other RNA
gctctgatcttagttatttt

SEQ ID NO: 3981 - RNA, 20 nt, synthetic construct
  source 1..20: mol_type = other RNA
gctagcttttgaatttgttt

SEQ ID NO: 3982 - RNA, 20 nt, synthetic construct
  source 1..20: mol_type = other RNA
aaagctagcagaaggcaaaa

SEQ ID NO: 3983 - RNA, 20 nt, synthetic construct
  source 1..20: mol_type = other RNA
ctagttcttttaattgtgat

SEQ ID NO: 3984 - RNA, 20 nt, synthetic construct
  source 1..20: mol_type = other RNA
tttaattgtgatgttagggt

SEQ ID NO: 3985 - RNA, 20 nt, synthetic construct
  source 1..20: mol_type = other RNA
tgctttctcctgtgggcatt

SEQ ID NO: 3986 - RNA, 20 nt, synthetic construct
  source 1..20: mol_type = other RNA
cctgtgggcatttagtgcta

SEQ ID NO: 3987 - RNA, 20 nt, synthetic construct
  source 1..20: mol_type = other RNA
ggtacgttgtgtctttgttc

SEQ ID NO: 3988 - RNA, 20 nt, synthetic construct
  source 1..20: mol_type = other RNA
cattggtttcaaataactta

SEQ ID NO: 3989 - RNA, 20 nt, synthetic construct
  source 1..20: mol_type = other RNA
aataacttatttatttctgc

SEQ ID NO: 3990 - RNA, 20 nt, synthetic construct
  source 1..20: mol_type = other RNA
gccttaatttcattatttac

SEQ ID NO: 3991 - RNA, 20 nt, synthetic construct
  source 1..20: mol_type = other RNA
ttatttacccagtagtcatt

SEQ ID NO: 3992 - RNA, 20 nt, synthetic construct
  source 1..20: mol_type = other RNA
ggagcaggttgttcagtttc

SEQ ID NO: 3993 - RNA, 20 nt, synthetic construct
  source 1..20: mol_type = other RNA
gtttccatgtagttgtgcga

SEQ ID NO: 3994 - RNA, 20 nt, synthetic construct
  source 1..20: mol_type = other RNA
atgtagttgtgcgattttga

SEQ ID NO: 3995 - RNA, 20 nt, synthetic construct
  source 1..20: mol_type = other RNA
ctcaaaatcgcacaactaca

SEQ ID NO: 3996 - RNA, 20 nt, synthetic construct
  source 1..20: mol_type = other RNA
taatcctgagttctaatttg

SEQ ID NO: 3997 - RNA, 20 nt, synthetic construct
  source 1..20: mol_type = other RNA
acaccacattgcacttactc

SEQ ID NO: 3998 - RNA, 20 nt, synthetic construct
  source 1..20: mol_type = other RNA
tttcaacaccacattgcact

SEQ ID NO: 3999 - RNA, 20 nt, synthetic construct
  source 1..20: mol_type = other RNA
gttgatttggggtggagagt

SEQ ID NO: 4000 - RNA, 20 nt, synthetic construct
  source 1..20: mol_type = other RNA
gtagatgtctattaggtctg

SEQ ID NO: 4001 - RNA, 20 nt, synthetic construct
  source 1..20: mol_type = other RNA
agtcctgaatatccttatta

SEQ ID NO: 4002 - RNA, 20 nt, synthetic construct
  source 1..20: mol_type = other RNA
tggtttagtcttgggagggt

SEQ ID NO: 4003 - RNA, 20 nt, synthetic construct
  source 1..20: mol_type = other RNA
tcttggtttagtcttgggag

SEQ ID NO: 4004 - RNA, 20 nt, synthetic construct
  source 1..20: mol_type = other RNA
acttcttcttggtttagtct

SEQ ID NO: 4005 - RNA, 20 nt, synthetic construct
  source 1..20: mol_type = other RNA
gggattcgacttcttcttgg

SEQ ID NO: 4006 - RNA, 20 nt, synthetic construct
  source 1..20: mol_type = other RNA
gaaatggaggcagtaattaa

SEQ ID NO: 4007 - RNA, 20 nt, synthetic construct
  source 1..20: mol_type = other RNA
gaacttgttattggtctatt

SEQ ID NO: 4008 - RNA, 20 nt, synthetic construct
  source 1..20: mol_type = other RNA
cagctgaattctaccagagg

SEQ ID NO: 4009 - RNA, 20 nt, synthetic construct
  source 1..20: mol_type = other RNA
gctgtgaatccatctggtcc

SEQ ID NO: 4010 - RNA, 20 nt, synthetic construct
  source 1..20: mol_type = other RNA
accagaggtacaaagaggag

SEQ ID NO: 4011 - RNA, 20 nt, synthetic construct
  source 1..20: mol_type = other RNA
ttctgaaactattccaagca

SEQ ID NO: 4012 - RNA, 20 nt, synthetic construct
  source 1..20: mol_type = other RNA
gaaactattccaagcaacag

SEQ ID NO: 4013 - RNA, 20 nt, synthetic construct
  source 1..20: mol_type = other RNA
gaaggaatggtaccagctcc

SEQ ID NO: 4014 - RNA, 20 nt, synthetic construct
  source 1..20: mol_type = other RNA
aagcaacagaaaaagaggga

SEQ ID NO: 4015 - RNA, 20 nt, synthetic construct
  source 1..20: mol_type = other RNA
gttgcttggaatagtttcag

SEQ ID NO: 4016 - RNA, 20 nt, synthetic construct
  source 1..20: mol_type = other RNA
aatactatgttaaataagag

SEQ ID NO: 4017 - RNA, 20 nt, synthetic construct
  source 1..20: mol_type = other RNA
ggccagggcaatcaggcaag

SEQ ID NO: 4018 - RNA, 20 nt, synthetic construct
  source 1..20: mol_type = other RNA
cttgcctgattgccctggcc

SEQ ID NO: 4019 - RNA, 20 nt, synthetic construct
  source 1..20: mol_type = other RNA
ttctcttgcctgattgccct

SEQ ID NO: 4020 - RNA, 20 nt, synthetic construct
  source 1..20: mol_type = other RNA
gataggaagacaggaagtca

SEQ ID NO: 4021 - RNA, 20 nt, synthetic construct
  source 1..20: mol_type = other RNA
tatctgaataccctttattt

SEQ ID NO: 4022 - RNA, 20 nt, synthetic construct
  source 1..20: mol_type = other RNA
tgtcttcctatctgaatacc

SEQ ID NO: 4023 - RNA, 20 nt, synthetic construct
  source 1..20: mol_type = other RNA
aaatatacaatcatgtcatc

SEQ ID NO: 4024 - RNA, 20 nt, synthetic construct
  source 1..20: mol_type = other RNA
ctcaggccaaaatctcctta

SEQ ID NO: 4025 - RNA, 20 nt, synthetic construct
  source 1..20: mol_type = other RNA
gcaaagtctcaggatacaaa

SEQ ID NO: 4026 - RNA, 20 nt, synthetic construct
  source 1..20: mol_type = other RNA
tatacacgaataatagacaa

SEQ ID NO: 4027 - RNA, 20 nt, synthetic construct
  source 1..20: mol_type = other RNA
tgtataggaatgtttgtgat

SEQ ID NO: 4028 - RNA, 20 nt, synthetic construct
  source 1..20: mol_type = other RNA
ctcatgatttgtctattatt

SEQ ID NO: 4029 - RNA, 20 nt, synthetic construct
  source 1..20: mol_type = other RNA
caattactacaaagagaaaa

SEQ ID NO: 4030 - RNA, 20 nt, synthetic construct
  source 1..20: mol_type = other RNA
ctttgtagtaattgtgaatg

SEQ ID NO: 4031 - RNA, 20 nt, synthetic construct
  source 1..20: mol_type = other RNA
taggtatttttttctctttg

SEQ ID NO: 4032 - RNA, 20 nt, synthetic construct
  source 1..20: mol_type = other RNA
tcaaggagaactacaaacca

SEQ ID NO: 4033 - RNA, 20 nt, synthetic construct
  source 1..20: mol_type = other RNA
aggagaactacaaaccactg

SEQ ID NO: 4034 - RNA, 20 nt, synthetic construct
  source 1..20: mol_type = other RNA
ccttgaagaagtcctccaca

SEQ ID NO: 4035 - RNA, 20 nt, synthetic construct
  source 1..20: mol_type = other RNA
ttgagcagtggtttgtagtt

SEQ ID NO: 4036 - RNA, 20 nt, synthetic construct
  source 1..20: mol_type = other RNA
atttgtttgtgtcctctctt

SEQ ID NO: 4037 - RNA, 20 nt, synthetic construct
  source 1..20: mol_type = other RNA
atgctcgtgcccaggaagaa

SEQ ID NO: 4038 - RNA, 20 nt, synthetic construct
  source 1..20: mol_type = other RNA
tgggcacgagcatggaatgt

SEQ ID NO: 4039 - RNA, 20 nt, synthetic construct
  source 1..20: mol_type = other RNA
tcctgggcacgagcatggaa

SEQ ID NO: 4040 - RNA, 20 nt, synthetic construct
  source 1..20: mol_type = other RNA
caacattgattcttcctggg

SEQ ID NO: 4041 - RNA, 20 nt, synthetic construct
  source 1..20: mol_type = other RNA
acgctatccccatcaagcta

SEQ ID NO: 4042 - RNA, 20 nt, synthetic construct
  source 1..20: mol_type = other RNA
tcacagaattagagaaaact

SEQ ID NO: 4043 - RNA, 20 nt, synthetic construct
  source 1..20: mol_type = other RNA
cagaattagagaaaactact

SEQ ID NO: 4044 - RNA, 20 nt, synthetic construct
  source 1..20: mol_type = other RNA
gtgaagaaagtcagtggtag

SEQ ID NO: 4045 - RNA, 20 nt, synthetic construct
  source 1..20: mol_type = other RNA
ctaattctgtgaagaaagtc

SEQ ID NO: 4046 - RNA, 20 nt, synthetic construct
  source 1..20: mol_type = other RNA
tatggaaccaaaacagaacc

SEQ ID NO: 4047 - RNA, 20 nt, synthetic construct
  source 1..20: mol_type = other RNA
atatgaaatttaaagtagtt

SEQ ID NO: 4048 - RNA, 20 nt, synthetic construct
  source 1..20: mol_type = other RNA
gttttggttccatatgaaat

SEQ ID NO: 4049 - RNA, 20 nt, synthetic construct
  source 1..20: mol_type = other RNA
ttttgcttaggattgtcttg

SEQ ID NO: 4050 - RNA, 20 nt, synthetic construct
  source 1..20: mol_type = other RNA
aactatactacaaggctaca

SEQ ID NO: 4051 - RNA, 20 nt, synthetic construct
  source 1..20: mol_type = other RNA
tgtttttaatgtaagcattt

SEQ ID NO: 4052 - RNA, 20 nt, synthetic construct
  source 1..20: mol_type = other RNA
attgacaacctaactttaca

SEQ ID NO: 4053 - RNA, 20 nt, synthetic construct
  source 1..20: mol_type = other RNA
ttaggtgtaaagttaggttg

SEQ ID NO: 4054 - RNA, 20 nt, synthetic construct
  source 1..20: mol_type = other RNA
agttccttaggtgtaaagtt

SEQ ID NO: 4055 - RNA, 20 nt, synthetic construct
  source 1..20: mol_type = other RNA
ttttctagttccttaggtgt

SEQ ID NO: 4056 - RNA, 20 nt, synthetic construct
  source 1..20: mol_type = other RNA
tctttttctagttccttagg

SEQ ID NO: 4057 - RNA, 20 nt, synthetic construct
  source 1..20: mol_type = other RNA
ttttactacctttaagtttg

SEQ ID NO: 4058 - RNA, 20 nt, synthetic construct
  source 1..20: mol_type = other RNA
ttccttttactacctttaag

SEQ ID NO: 4059 - RNA, 20 nt, synthetic construct
  source 1..20: mol_type = other RNA
actctaatctttgttatttc

SEQ ID NO: 4060 - RNA, 20 nt, synthetic construct
  source 1..20: mol_type = other RNA
ttattttatttatttccact

SEQ ID NO: 4061 - RNA, 20 nt, synthetic construct
  source 1..20: mol_type = other RNA
ttttggtattgttttgccat

SEQ ID NO: 4062 - RNA, 20 nt, synthetic construct
  source 1..20: mol_type = other RNA
ttgatttttttttttctttt

SEQ ID NO: 4063 - RNA, 20 nt, synthetic construct
  source 1..20: mol_type = other RNA
aagaggcaacttttggtttc

SEQ ID NO: 4064 - RNA, 20 nt, synthetic construct
  source 1..20: mol_type = other RNA
ttcaaagaggcaacttttgg

SEQ ID NO: 4065 - RNA, 20 nt, synthetic construct
  source 1..20: mol_type = other RNA
cccttttttgtgttagtcta

SEQ ID NO: 4066 - RNA, 20 nt, synthetic construct
  source 1..20: mol_type = other RNA
gagtttagtaatttgatcct

SEQ ID NO: 4067 - RNA, 20 nt, synthetic construct
  source 1..20: mol_type = other RNA
tttctgagtttagtaatttg

SEQ ID NO: 4068 - RNA, 20 nt, synthetic construct
  source 1..20: mol_type = other RNA
gtaaaattggtagttatgta

SEQ ID NO: 4069 - RNA, 20 nt, synthetic construct
  source 1..20: mol_type = other RNA
atttctgtaaaattggtagt

SEQ ID NO: 4070 - RNA, 20 nt, synthetic construct
  source 1..20: mol_type = other RNA
ttttttttttttggattacc

SEQ ID NO: 4071 - RNA, 20 nt, synthetic construct
  source 1..20: mol_type = other RNA
tttctttttttttttttgga

SEQ ID NO: 4072 - RNA, 20 nt, synthetic construct
  source 1..20: mol_type = other RNA
tttcttttcttttttttttt

SEQ ID NO: 4073 - RNA, 20 nt, synthetic construct
  source 1..20: mol_type = other RNA
ttgttgggagtttgtttttc

SEQ ID NO: 4074 - RNA, 20 nt, synthetic construct
  source 1..20: mol_type = other RNA
ctggtgaattctaccaatat

SEQ ID NO: 4075 - RNA, 20 nt, synthetic construct
  source 1..20: mol_type = other RNA
ccagtgaagccatctggtcc

SEQ ID NO: 4076 - RNA, 20 nt, synthetic construct
  source 1..20: mol_type = other RNA
accaatatttaaagaattac

SEQ ID NO: 4077 - RNA, 20 nt, synthetic construct
  source 1..20: mol_type = other RNA
ttaaatattggtagaattca

SEQ ID NO: 4078 - RNA, 20 nt, synthetic construct
  source 1..20: mol_type = other RNA
gccagagcaattaggcaaga

SEQ ID NO: 4079 - RNA, 20 nt, synthetic construct
  source 1..20: mol_type = other RNA
tgcctaattgctctggctga

SEQ ID NO: 4080 - RNA, 20 nt, synthetic construct
  source 1..20: mol_type = other RNA
ttttcttgcctaattgctct

SEQ ID NO: 4081 - RNA, 20 nt, synthetic construct
  source 1..20: mol_type = other RNA
atttggatgtcttttagttc

SEQ ID NO: 4082 - RNA, 20 nt, synthetic construct
  source 1..20: mol_type = other RNA
cctgcctcagcctcccgagt

SEQ ID NO: 4083 - RNA, 20 nt, synthetic construct
  source 1..20: mol_type = other RNA
cgccattctcctgcctcagc

SEQ ID NO: 4084 - RNA, 20 nt, synthetic construct
  source 1..20: mol_type = other RNA
cgggttcacgccattctcct

SEQ ID NO: 4085 - RNA, 20 nt, synthetic construct
  source 1..20: mol_type = other RNA
cggcttcccgggttcacgcc

SEQ ID NO: 4086 - RNA, 20 nt, synthetic construct
  source 1..20: mol_type = other RNA
tttttttttttttttttttt

SEQ ID NO: 4087 - RNA, 20 nt, synthetic construct
  source 1..20: mol_type = other RNA
gtttgatcattgttagtgta

SEQ ID NO: 4088 - RNA, 20 nt, synthetic construct
  source 1..20: mol_type = other RNA
ttttcagtttgatcattgtt

SEQ ID NO: 4089 - RNA, 20 nt, synthetic construct
  source 1..20: mol_type = other RNA
acttacaatagcatcaaaaa

SEQ ID NO: 4090 - RNA, 20 nt, synthetic construct
  source 1..20: mol_type = other RNA
taagtattttattatttttg

SEQ ID NO: 4091 - RNA, 20 nt, synthetic construct
  source 1..20: mol_type = other RNA
ttaagttggttcctaagtat

SEQ ID NO: 4092 - RNA, 20 nt, synthetic construct
  source 1..20: mol_type = other RNA
ctgtacaagtcttttgtttc

SEQ ID NO: 4093 - RNA, 20 nt, synthetic construct
  source 1..20: mol_type = other RNA
gcaatgtttgtagatttcac

SEQ ID NO: 4094 - RNA, 20 nt, synthetic construct
  source 1..20: mol_type = other RNA
ttcagcaatgtttgtagatt

SEQ ID NO: 4095 - RNA, 20 nt, synthetic construct
  source 1..20: mol_type = other RNA
aggattgaaagacaaaatct

SEQ ID NO: 4096 - RNA, 20 nt, synthetic construct
  source 1..20: mol_type = other RNA
atccttgaacacaagatgtc

SEQ ID NO: 4097 - RNA, 20 nt, synthetic construct
  source 1..20: mol_type = other RNA
tggctatgacagcaaaaaac

SEQ ID NO: 4098 - RNA, 20 nt, synthetic construct
  source 1..20: mol_type = other RNA
ctttagttacctgtgttttt

SEQ ID NO: 4099 - RNA, 20 nt, synthetic construct
  source 1..20: mol_type = other RNA
cagtttggtgattgactttt

SEQ ID NO: 4100 - RNA, 20 nt, synthetic construct
  source 1..20: mol_type = other RNA
tatatagaaaattttaattt

SEQ ID NO: 4101 - RNA, 20 nt, synthetic construct
  source 1..20: mol_type = other RNA
atataggaaaaaatgcctca

SEQ ID NO: 4102 - RNA, 20 nt, synthetic construct
  source 1..20: mol_type = other RNA
atttttattacctacctctg

SEQ ID NO: 4103 - RNA, 20 nt, synthetic construct
  source 1..20: mol_type = other RNA
aggcgtaatcctcacggctc

SEQ ID NO: 4104 - RNA, 20 nt, synthetic construct
  source 1..20: mol_type = other RNA
tctaggcgtaatcctcacgg

SEQ ID NO: 4105 - RNA, 20 nt, synthetic construct
  source 1..20: mol_type = other RNA
gcacatctggatgcgctgat

SEQ ID NO: 4106 - RNA, 20 nt, synthetic construct
  source 1..20: mol_type = other RNA
ccgggttgcctgtgatcagc

SEQ ID NO: 4107 - RNA, 20 nt, synthetic construct
  source 1..20: mol_type = other RNA
gattcgccgggttgcctgtg

SEQ ID NO: 4108 - RNA, 20 nt, synthetic construct
  source 1..20: mol_type = other RNA
tgtctgtcctttgctgctga

SEQ ID NO: 4109 - RNA, 20 nt, synthetic construct
  source 1..20: mol_type = other RNA
cattacttacaaaactcctt

SEQ ID NO: 4110 - RNA, 20 nt, synthetic construct
  source 1..20: mol_type = other RNA
gctcggatcaccaagtgctg

SEQ ID NO: 4111 - RNA, 20 nt, synthetic construct
  source 1..20: mol_type = other RNA
tcattgatattctgctcgga

SEQ ID NO: 4112 - RNA, 20 nt, synthetic construct
  source 1..20: mol_type = other RNA
ataacttgccctgtgttgct

SEQ ID NO: 4113 - RNA, 20 nt, synthetic construct
  source 1..20: mol_type = other RNA
tattagcatctttctataac

SEQ ID NO: 4114 - RNA, 20 nt, synthetic construct
  source 1..20: mol_type = other RNA
tcttattagcatctttctat

SEQ ID NO: 4115 - RNA, 20 nt, synthetic construct
  source 1..20: mol_type = other RNA
cacacccacatcccccattt

SEQ ID NO: 4116 - RNA, 20 nt, synthetic construct
  source 1..20: mol_type = other RNA
aattttgattaatttcttaa

SEQ ID NO: 4117 - RNA, 20 nt, synthetic construct
  source 1..20: mol_type = other RNA
taagctcaacttaagcataa

SEQ ID NO: 4118 - RNA, 20 nt, synthetic construct
  source 1..20: mol_type = other RNA
ccaagcaaaagccaaatctt

SEQ ID NO: 4119 - RNA, 20 nt, synthetic construct
  source 1..20: mol_type = other RNA
cagttcaccaagcaaaagcc

SEQ ID NO: 4120 - RNA, 20 nt, synthetic construct
  source 1..20: mol_type = other RNA
ggtggcttctcagttcacca

SEQ ID NO: 4121 - RNA, 20 nt, synthetic construct
  source 1..20: mol_type = other RNA
ctactcagcaaccagggtgg

SEQ ID NO: 4122 - RNA, 20 nt, synthetic construct
  source 1..20: mol_type = other RNA
gccttgcagtttattctcta

SEQ ID NO: 4123 - RNA, 20 nt, synthetic construct
  source 1..20: mol_type = other RNA
tgcttctgccttgcagttta

SEQ ID NO: 4124 - RNA, 20 nt, synthetic construct
  source 1..20: mol_type = other RNA
tagataaggtcccattggtc

SEQ ID NO: 4125 - RNA, 20 nt, synthetic construct
  source 1..20: mol_type = other RNA
tcctagataaggtcccattg

SEQ ID NO: 4126 - RNA, 20 nt, synthetic construct
  source 1..20: mol_type = other RNA
ttacatttcttcctagataa

SEQ ID NO: 4127 - RNA, 20 nt, synthetic construct
  source 1..20: mol_type = other RNA
caacagaaacttggcctttc

SEQ ID NO: 4128 - RNA, 20 nt, synthetic construct
  source 1..20: mol_type = other RNA
gttgggaattctttacattt

SEQ ID NO: 4129 - RNA, 20 nt, synthetic construct
  source 1..20: mol_type = other RNA
ctgaaagagattaatcacaa

SEQ ID NO: 4130 - RNA, 20 nt, synthetic construct
  source 1..20: mol_type = other RNA
gggaaaggccaagtttctgt

SEQ ID NO: 4131 - RNA, 20 nt, synthetic construct
  source 1..20: mol_type = other RNA
gagccagcaactgggtatgc

SEQ ID NO: 4132 - RNA, 20 nt, synthetic construct
  source 1..20: mol_type = other RNA
tgttacgtgcctacagcttc

SEQ ID NO: 4133 - RNA, 20 nt, synthetic construct
  source 1..20: mol_type = other RNA
acaacagtctgtatccacca

SEQ ID NO: 4134 - RNA, 20 nt, synthetic construct
  source 1..20: mol_type = other RNA
cgcatgcagggctactggtt

SEQ ID NO: 4135 - RNA, 20 nt, synthetic construct
  source 1..20: mol_type = other RNA
ccttcacttccagagctgca

SEQ ID NO: 4136 - RNA, 20 nt, synthetic construct
  source 1..20: mol_type = other RNA
cttccagagctgcaattgct

SEQ ID NO: 4137 - RNA, 20 nt, synthetic construct
  source 1..20: mol_type = other RNA
agagctgcaattgcttcctg

SEQ ID NO: 4138 - RNA, 20 nt, synthetic construct
  source 1..20: mol_type = other RNA
tgaaaacaggtaagcagaaa

SEQ ID NO: 4139 - RNA, 20 nt, synthetic construct
  source 1..20: mol_type = other RNA
ggaagcaattgcagctctgg

SEQ ID NO: 4140 - RNA, 20 nt, synthetic construct
  source 1..20: mol_type = other RNA
gcttacctgttttcaggaag

SEQ ID NO: 4141 - RNA, 20 nt, synthetic construct
  source 1..20: mol_type = other RNA
tgtaggatccacagtaaatt

SEQ ID NO: 4142 - RNA, 20 nt, synthetic construct
  source 1..20: mol_type = other RNA
ttaaaacacatttgcaggca

SEQ ID NO: 4143 - RNA, 20 nt, synthetic construct
  source 1..20: mol_type = other RNA
caaggcaaaactaatttcag

SEQ ID NO: 4144 - RNA, 20 nt, synthetic construct
  source 1..20: mol_type = other RNA
ggcgatagaagtgaaaatag

SEQ ID NO: 4145 - RNA, 20 nt, synthetic construct
  source 1..20: mol_type = other RNA
aaaatagagattgagcagga

SEQ ID NO: 4146 - RNA, 20 nt, synthetic construct
  source 1..20: mol_type = other RNA
tgctcaatctctattttaga

SEQ ID NO: 4147 - RNA, 20 nt, synthetic construct
  source 1..20: mol_type = other RNA
cagctttatttggtcttcct

SEQ ID NO: 4148 - RNA, 20 nt, synthetic construct
  source 1..20: mol_type = other RNA
ttaggcctctttaaaatata

SEQ ID NO: 4149 - RNA, 20 nt, synthetic construct
  source 1..20: mol_type = other RNA
tgacacttttatactcagct

SEQ ID NO: 4150 - RNA, 20 nt, synthetic construct
  source 1..20: mol_type = other RNA
tcaagctctgtatacactta

SEQ ID NO: 4151 - RNA, 20 nt, synthetic construct
  source 1..20: mol_type = other RNA
cttgcttgtgagcatgagta

SEQ ID NO: 4152 - RNA, 20 nt, synthetic construct
  source 1..20: mol_type = other RNA
gtgtgtaggtttgccagagt

SEQ ID NO: 4153 - RNA, 20 nt, synthetic construct
  source 1..20: mol_type = other RNA
tatggttatttcttacccag

SEQ ID NO: 4154 - RNA, 20 nt, synthetic construct
  source 1..20: mol_type = other RNA
tacccagtgttctcattact

SEQ ID NO: 4155 - RNA, 20 nt, synthetic construct
  source 1..20: mol_type = other RNA
cattactgtctctttttaat

SEQ ID NO: 4156 - RNA, 20 nt, synthetic construct
  source 1..20: mol_type = other RNA
ggtactgattaaaaagagac

SEQ ID NO: 4157 - RNA, 20 nt, synthetic construct
  source 1..20: mol_type = other RNA
aattccagcaggacacaggg

SEQ ID NO: 4158 - RNA, 20 nt, synthetic construct
  source 1..20: mol_type = other RNA
aaacagactcagcagttcag

SEQ ID NO: 4159 - RNA, 20 nt, synthetic construct
  source 1..20: mol_type = other RNA
agcaggacacagggaattac

SEQ ID NO: 4160 - RNA, 20 nt, synthetic construct
  source 1..20: mol_type = other RNA
ctgtgtcctgctggaattcg

SEQ ID NO: 4161 - RNA, 20 nt, synthetic construct
  source 1..20: mol_type = other RNA
ttaattggctggctactccc

SEQ ID NO: 4162 - RNA, 20 nt, synthetic construct
  source 1..20: mol_type = other RNA
tgagattgtcatgggctgcg

SEQ ID NO: 4163 - RNA, 20 nt, synthetic construct
  source 1..20: mol_type = other RNA
actgtggcttgcttcatgag

SEQ ID NO: 4164 - RNA, 20 nt, synthetic construct
  source 1..20: mol_type = other RNA
cttctactgtggcttgcttc

SEQ ID NO: 4165 - RNA, 20 nt, synthetic construct
  source 1..20: mol_type = other RNA
attgtctaaagaatggaaca

SEQ ID NO: 4166 - RNA, 20 nt, synthetic construct
  source 1..20: mol_type = other RNA
ttagacaatggaagtaagtg

SEQ ID NO: 4167 - RNA, 20 nt, synthetic construct
  source 1..20: mol_type = other RNA
attctttagacaatggaagt

SEQ ID NO: 4168 - RNA, 20 nt, synthetic construct
  source 1..20: mol_type = other RNA
cataatacttgttccattct

SEQ ID NO: 4169 - RNA, 20 nt, synthetic construct
  source 1..20: mol_type = other RNA
agacattttagtccctctta

SEQ ID NO: 4170 - RNA, 20 nt, synthetic construct
  source 1..20: mol_type = other RNA
tcaaccctaatagaagacct

SEQ ID NO: 4171 - RNA, 20 nt, synthetic construct
  source 1..20: mol_type = other RNA
attagggttgaggaaatcat

SEQ ID NO: 4172 - RNA, 20 nt, synthetic construct
  source 1..20: mol_type = other RNA
ggggtaccacataaggacat

SEQ ID NO: 4173 - RNA, 20 nt, synthetic construct
  source 1..20: mol_type = other RNA
gaatgggcgggaagaaagtg

SEQ ID NO: 4174 - RNA, 20 nt, synthetic construct
  source 1..20: mol_type = other RNA
gaaatgtcagccggcagaca

SEQ ID NO: 4175 - RNA, 20 nt, synthetic construct
  source 1..20: mol_type = other RNA
cgcccattccgaaatgtcag

SEQ ID NO: 4176 - RNA, 20 nt, synthetic construct
  source 1..20: mol_type = other RNA
tcccgcccattccgaaatgt

SEQ ID NO: 4177 - RNA, 20 nt, synthetic construct
  source 1..20: mol_type = other RNA
ataccatctttggtgaggtc

SEQ ID NO: 4178 - RNA, 20 nt, synthetic construct
  source 1..20: mol_type = other RNA
tctaataacgtgggcattgt

SEQ ID NO: 4179 - RNA, 20 nt, synthetic construct
  source 1..20: mol_type = other RNA
ttttaagatttttacttgtc

SEQ ID NO: 4180 - RNA, 20 nt, synthetic construct
  source 1..20: mol_type = other RNA
gagtccattcatactattta

SEQ ID NO: 4181 - RNA, 20 nt, synthetic construct
  source 1..20: mol_type = other RNA
tactatttaaaaacatgatt

SEQ ID NO: 4182 - RNA, 20 nt, synthetic construct
  source 1..20: mol_type = other RNA
atctgtctacagcttgcaag

SEQ ID NO: 4183 - RNA, 20 nt, synthetic construct
  source 1..20: mol_type = other RNA
tagtctacttctgatgggat

SEQ ID NO: 4184 - RNA, 20 nt, synthetic construct
  source 1..20: mol_type = other RNA
gatgggatggagtctctctg

SEQ ID NO: 4185 - RNA, 20 nt, synthetic construct
  source 1..20: mol_type = other RNA
aaaagaagaaaaaaaggcag

SEQ ID NO: 4186 - RNA, 20 nt, synthetic construct
  source 1..20: mol_type = other RNA
ttttgaagtttggttgtaaa

SEQ ID NO: 4187 - RNA, 20 nt, synthetic construct
  source 1..20: mol_type = other RNA
tctttttgaagtttggttgt

SEQ ID NO: 4188 - RNA, 20 nt, synthetic construct
  source 1..20: mol_type = other RNA
attttttttcattttaaatt

SEQ ID NO: 4189 - RNA, 20 nt, synthetic construct
  source 1..20: mol_type = other RNA
ttttaaattttccataagta

SEQ ID NO: 4190 - RNA, 20 nt, synthetic construct
  source 1..20: mol_type = other RNA
ataagtaatgtaatcagtca

SEQ ID NO: 4191 - RNA, 20 nt, synthetic construct
  source 1..20: mol_type = other RNA
atggtttcctatttcctatg

SEQ ID NO: 4192 - RNA, 20 nt, synthetic construct
  source 1..20: mol_type = other RNA
tatttcctatgctgaaaaac

SEQ ID NO: 4193 - RNA, 20 nt, synthetic construct
  source 1..20: mol_type = other RNA
tatgctgaaaaacagcagag

SEQ ID NO: 4194 - RNA, 20 nt, synthetic construct
  source 1..20: mol_type = other RNA
gcataggaaataggaaacca

SEQ ID NO: 4195 - RNA, 20 nt, synthetic construct
  source 1..20: mol_type = other RNA
cagtagcctgtaagaccctt

SEQ ID NO: 4196 - RNA, 20 nt, synthetic construct
  source 1..20: mol_type = other RNA
taacttgacctctggtatct

SEQ ID NO: 4197 - RNA, 20 nt, synthetic construct
  source 1..20: mol_type = other RNA
ggtctttgctagatgtcacc

SEQ ID NO: 4198 - RNA, 20 nt, synthetic construct
  source 1..20: mol_type = other RNA
ctggggtgacatctagcaaa

SEQ ID NO: 4199 - RNA, 20 nt, synthetic construct
  source 1..20: mol_type = other RNA
tgatcaccctactgaaaatc

SEQ ID NO: 4200 - RNA, 20 nt, synthetic construct
  source 1..20: mol_type = other RNA
catcactcagccatttacag

SEQ ID NO: 4201 - RNA, 20 nt, synthetic construct
  source 1..20: mol_type = other RNA
acactgtagaggtgttttta

SEQ ID NO: 4202 - RNA, 20 nt, synthetic construct
  source 1..20: mol_type = other RNA
ctgtgccagacctcccctca

SEQ ID NO: 4203 - RNA, 20 nt, synthetic construct
  source 1..20: mol_type = other RNA
tgaggggaggtctggcacag

SEQ ID NO: 4204 - RNA, 20 nt, synthetic construct
  source 1..20: mol_type = other RNA
ttcaaccatcctctgctcat

SEQ ID NO: 4205 - RNA, 20 nt, synthetic construct
  source 1..20: mol_type = other RNA
accatcctctgctcatgctt

SEQ ID NO: 4206 - RNA, 20 nt, synthetic construct
  source 1..20: mol_type = other RNA
tcctttgcttgaacaccagg

SEQ ID NO: 4207 - RNA, 20 nt, synthetic construct
  source 1..20: mol_type = other RNA
agcaaaggatgaaggagaga

SEQ ID NO: 4208 - RNA, 20 nt, synthetic construct
  source 1..20: mol_type = other RNA
caagacaggcgatgcgtctt

SEQ ID NO: 4209 - RNA, 20 nt, synthetic construct
  source 1..20: mol_type = other RNA
tgctctcactcacccttcct

SEQ ID NO: 4210 - RNA, 20 nt, synthetic construct
  source 1..20: mol_type = other RNA
ttccattccagcttggagtg

SEQ ID NO: 4211 - RNA, 20 nt, synthetic construct
  source 1..20: mol_type = other RNA
ttgttaaaccatcagctgcc

SEQ ID NO: 4212 - RNA, 20 nt, synthetic construct
  source 1..20: mol_type = other RNA
ccttatttcaaactgacatg

SEQ ID NO: 4213 - RNA, 20 nt, synthetic construct
  source 1..20: mol_type = other RNA
aactgacatgagacacaaaa

SEQ ID NO: 4214 - RNA, 20 nt, synthetic construct
  source 1..20: mol_type = other RNA
tttgtgtctcatgtcagttt

SEQ ID NO: 4215 - RNA, 20 nt, synthetic construct
  source 1..20: mol_type = other RNA
actcttcttgaaaatttccc

SEQ ID NO: 4216 - RNA, 20 nt, synthetic construct
  source 1..20: mol_type = other RNA
tgaaaatttcccccactacc

SEQ ID NO: 4217 - RNA, 20 nt, synthetic construct
  source 1..20: mol_type = other RNA
gcaactcatgtaacattaca

SEQ ID NO: 4218 - RNA, 20 nt, synthetic construct
  source 1..20: mol_type = other RNA
atgtaatgttacatgagttg

SEQ ID NO: 4219 - RNA, 20 nt, synthetic construct
  source 1..20: mol_type = other RNA
tcaaagctggcggtttgagg

SEQ ID NO: 4220 - RNA, 20 nt, synthetic construct
  source 1..20: mol_type = other RNA
cagaaggatttggcacagct

SEQ ID NO: 4221 - RNA, 20 nt, synthetic construct
  source 1..20: mol_type = other RNA
gtgaaaacttcctcaaagct

SEQ ID NO: 4222 - RNA, 20 nt, synthetic construct
  source 1..20: mol_type = other RNA
ggccatgtcatcatcagctg

SEQ ID NO: 4223 - RNA, 20 nt, synthetic construct
  source 1..20: mol_type = other RNA
aagctccaaactcatgccaa

SEQ ID NO: 4224 - RNA, 20 nt, synthetic construct
  source 1..20: mol_type = other RNA
ctaggttctaagctccaaac

SEQ ID NO: 4225 - RNA, 20 nt, synthetic construct
  source 1..20: mol_type = other RNA
tccacacattttcagcagaa

SEQ ID NO: 4226 - RNA, 20 nt, synthetic construct
  source 1..20: mol_type = other RNA
cgataaaataatcacatttt

SEQ ID NO: 4227 - RNA, 20 nt, synthetic construct
  source 1..20: mol_type = other RNA
ctattctatttactttggaa

SEQ ID NO: 4228 - RNA, 20 nt, synthetic construct
  source 1..20: mol_type = other RNA
atttactttggaagaaaaat

SEQ ID NO: 4229 - RNA, 20 nt, synthetic construct
  source 1..20: mol_type = other RNA
aaagtaaatagaatagggaa

SEQ ID NO: 4230 - RNA, 20 nt, synthetic construct
  source 1..20: mol_type = other RNA
tccaaagtaaatagaatagg

SEQ ID NO: 4231 - RNA, 20 nt, synthetic construct
  source 1..20: mol_type = other RNA
gttctagagaaagctggtgt

SEQ ID NO: 4232 - RNA, 20 nt, synthetic construct
  source 1..20: mol_type = other RNA
agagaaagctggtgtgttct

SEQ ID NO: 4233 - RNA, 20 nt, synthetic construct
  source 1..20: mol_type = other RNA
ctagaacggaaagatttttc

SEQ ID NO: 4234 - RNA, 20 nt, synthetic construct
  source 1..20: mol_type = other RNA
tttcatgaaactggcaaaca

SEQ ID NO: 4235 - RNA, 20 nt, synthetic construct
  source 1..20: mol_type = other RNA
ttagaaagatatacaccaaa

SEQ ID NO: 4236 - RNA, 20 nt, synthetic construct
  source 1..20: mol_type = other RNA
aaagaatatatctagcatat

SEQ ID NO: 4237 - RNA, 20 nt, synthetic construct
  source 1..20: mol_type = other RNA
caacaataactctaactcct

SEQ ID NO: 4238 - RNA, 20 nt, synthetic construct
  source 1..20: mol_type = other RNA
aactattttgtgtacctaaa

SEQ ID NO: 4239 - RNA, 20 nt, synthetic construct
  source 1..20: mol_type = other RNA
tttgatattttttgttttgc

SEQ ID NO: 4240 - RNA, 20 nt, synthetic construct
  source 1..20: mol_type = other RNA
cacctactcagaagtcttaa

SEQ ID NO: 4241 - RNA, 20 nt, synthetic construct
  source 1..20: mol_type = other RNA
gagtaggtgtgaattccttt

SEQ ID NO: 4242 - RNA, 20 nt, synthetic construct
  source 1..20: mol_type = other RNA
gtttttctattaaatatagg

SEQ ID NO: 4243 - RNA, 20 nt, synthetic construct
  source 1..20: mol_type = other RNA
attaaatataggtgtttaaa

SEQ ID NO: 4244 - RNA, 20 nt, synthetic construct
  source 1..20: mol_type = other RNA
agtgtaattttaaacaccta

SEQ ID NO: 4245 - RNA, 20 nt, synthetic construct
  source 1..20: mol_type = other RNA
tgccagatctgtcatttgtt

SEQ ID NO: 4246 - RNA, 20 nt, synthetic construct
  source 1..20: mol_type = other RNA
ttaggcttaaatgggctaaa

SEQ ID NO: 4247 - RNA, 20 nt, synthetic construct
  source 1..20: mol_type = other RNA
taggcaattttctgttttgg

SEQ ID NO: 4248 - RNA, 20 nt, synthetic construct
  source 1..20: mol_type = other RNA
gttttggaaatactgcatat

SEQ ID NO: 4249 - RNA, 20 nt, synthetic construct
  source 1..20: mol_type = other RNA
aaaacagaaaattgcctagg

SEQ ID NO: 4250 - RNA, 20 nt, synthetic construct
  source 1..20: mol_type = other RNA
ttttagaccaacatgtcttt

SEQ ID NO: 4251 - RNA, 20 nt, synthetic construct
  source 1..20: mol_type = other RNA
caggaatgattaaggcaaat

SEQ ID NO: 4252 - RNA, 20 nt, synthetic construct
  source 1..20: mol_type = other RNA
tgtgaaaagacatgttggtc

SEQ ID NO: 4253 - RNA, 20 nt, synthetic construct
  source 1..20: mol_type = other RNA
tatttgccttaatcattcct

SEQ ID NO: 4254 - RNA, 20 nt, synthetic construct
  source 1..20: mol_type = other RNA
aggtgtgatgacatttcata

SEQ ID NO: 4255 - RNA, 20 nt, synthetic construct
  source 1..20: mol_type = other RNA
ttagtgcctggatataactt

SEQ ID NO: 4256 - RNA, 20 nt, synthetic construct
  source 1..20: mol_type = other RNA
taagacaaagcaaaatcatt

SEQ ID NO: 4257 - RNA, 20 nt, synthetic construct
  source 1..20: mol_type = other RNA
gggctttattttcttcagac

SEQ ID NO: 4258 - RNA, 20 nt, synthetic construct
  source 1..20: mol_type = other RNA
tcagaccaagagtggtatga

SEQ ID NO: 4259 - RNA, 20 nt, synthetic construct
  source 1..20: mol_type = other RNA
gaccaagagtggtatgaggg

SEQ ID NO: 4260 - RNA, 20 nt, synthetic construct
  source 1..20: mol_type = other RNA
ttttgacaggtctatttgga

SEQ ID NO: 4261 - RNA, 20 nt, synthetic construct
  source 1..20: mol_type = other RNA
atttcattttgacaggtcta

SEQ ID NO: 4262 - RNA, 20 nt, synthetic construct
  source 1..20: mol_type = other RNA
ttccatttcattttgacagg

SEQ ID NO: 4263 - RNA, 20 nt, synthetic construct
  source 1..20: mol_type = other RNA
tacttctaagttgtagagca

SEQ ID NO: 4264 - RNA, 20 nt, synthetic construct
  source 1..20: mol_type = other RNA
aagttgtagagcactctgaa

SEQ ID NO: 4265 - RNA, 20 nt, synthetic construct
  source 1..20: mol_type = other RNA
gagtgctctacaacttagaa

SEQ ID NO: 4266 - RNA, 20 nt, synthetic construct
  source 1..20: mol_type = other RNA
cggggcaaaagatcgaaaca

SEQ ID NO: 4267 - RNA, 20 nt, synthetic construct
  source 1..20: mol_type = other RNA
atcttttgccccgggaatgt

SEQ ID NO: 4268 - RNA, 20 nt, synthetic construct
  source 1..20: mol_type = other RNA
aaaattgaactggcacttgg

SEQ ID NO: 4269 - RNA, 20 nt, synthetic construct
  source 1..20: mol_type = other RNA
attttagaaagtctgtttcg

SEQ ID NO: 4270 - RNA, 20 nt, synthetic construct
  source 1..20: mol_type = other RNA
cagtcctcaaaatctccatc

SEQ ID NO: 4271 - RNA, 20 nt, synthetic construct
  source 1..20: mol_type = other RNA
gacagcaatgttttctaagt

SEQ ID NO: 4272 - RNA, 20 nt, synthetic construct
  source 1..20: mol_type = other RNA
aagtttaagagaatgagaaa

SEQ ID NO: 4273 - RNA, 20 nt, synthetic construct
  source 1..20: mol_type = other RNA
cttaaacttagaaaacattg

SEQ ID NO: 4274 - RNA, 20 nt, synthetic construct
  source 1..20: mol_type = other RNA
cattctcttaaacttagaaa

SEQ ID NO: 4275 - RNA, 20 nt, synthetic construct
  source 1..20: mol_type = other RNA
ttccctctttaatataagcc

SEQ ID NO: 4276 - RNA, 20 nt, synthetic construct
  source 1..20: mol_type = other RNA
ctctttaatataagccacac

SEQ ID NO: 4277 - RNA, 20 nt, synthetic construct
  source 1..20: mol_type = other RNA
aaaaattaacttcataaaac

SEQ ID NO: 4278 - RNA, 20 nt, synthetic construct
  source 1..20: mol_type = other RNA
taaaaccacatcactccgta

SEQ ID NO: 4279 - RNA, 20 nt, synthetic construct
  source 1..20: mol_type = other RNA
agcctaccactttagcaatc

SEQ ID NO: 4280 - RNA, 20 nt, synthetic construct
  source 1..20: mol_type = other RNA
attttataatttagtggtag

SEQ ID NO: 4281 - RNA, 20 nt, synthetic construct
  source 1..20: mol_type = other RNA
aacaactttttctacatcaa

SEQ ID NO: 4282 - RNA, 20 nt, synthetic construct
  source 1..20: mol_type = other RNA
acatcaatttattctgagaa

SEQ ID NO: 4283 - RNA, 20 nt, synthetic construct
  source 1..20: mol_type = other RNA
gagaacataattaaacaata

SEQ ID NO: 4284 - RNA, 20 nt, synthetic construct
  source 1..20: mol_type = other RNA
cagaataaattgatgtagaa

SEQ ID NO: 4285 - RNA, 20 nt, synthetic construct
  source 1..20: mol_type = other RNA
ttaagggatttatccatata

SEQ ID NO: 4286 - RNA, 20 nt, synthetic construct
  source 1..20: mol_type = other RNA
aacaattaacaaaaatgaac

SEQ ID NO: 4287 - RNA, 20 nt, synthetic construct
  source 1..20: mol_type = other RNA
tttttgttaattgttagaat

SEQ ID NO: 4288 - RNA, 20 nt, synthetic construct
  source 1..20: mol_type = other RNA
cagttgatatttaaagttca

SEQ ID NO: 4289 - RNA, 20 nt, synthetic construct
  source 1..20: mol_type = other RNA
aagaggcatcatgggtaatg

SEQ ID NO: 4290 - RNA, 20 nt, synthetic construct
  source 1..20: mol_type = other RNA
ttacccatgatgcctctttg

SEQ ID NO: 4291 - RNA, 20 nt, synthetic construct
  source 1..20: mol_type = other RNA
gttgagacgtttttcattac

SEQ ID NO: 4292 - RNA, 20 nt, synthetic construct
  source 1..20: mol_type = other RNA
agctatcctcctacctcagc

SEQ ID NO: 4293 - RNA, 20 nt, synthetic construct
  source 1..20: mol_type = other RNA
tcctaaagaatcaagttgat

SEQ ID NO: 4294 - RNA, 20 nt, synthetic construct
  source 1..20: mol_type = other RNA
taaagaatcaagttgatcaa

SEQ ID NO: 4295 - RNA, 20 nt, synthetic construct
  source 1..20: mol_type = other RNA
ttaggaagaaaggtatgagt

SEQ ID NO: 4296 - RNA, 20 nt, synthetic construct
  source 1..20: mol_type = other RNA
tgaatggctggatcagtggg

SEQ ID NO: 4297 - RNA, 20 nt, synthetic construct
  source 1..20: mol_type = other RNA
ggaagcccttgatcaacttg

SEQ ID NO: 4298 - RNA, 20 nt, synthetic construct
  source 1..20: mol_type = other RNA
gctcttgatacccactgatc

SEQ ID NO: 4299 - RNA, 20 nt, synthetic construct
  source 1..20: mol_type = other RNA
gtactcgtagagttatcctg

SEQ ID NO: 4300 - RNA, 20 nt, synthetic construct
  source 1..20: mol_type = other RNA
ggataactctacgagtacgg

SEQ ID NO: 4301 - RNA, 20 nt, synthetic construct
  source 1..20: mol_type = other RNA
aatacaaattttttcatata

SEQ ID NO: 4302 - RNA, 20 nt, synthetic construct
  source 1..20: mol_type = other RNA
tataagccatagtttaattc

SEQ ID NO: 4303 - RNA, 20 nt, synthetic construct
  source 1..20: mol_type = other RNA
acaaagtccattagtatgga

SEQ ID NO: 4304 - RNA, 20 nt, synthetic construct
  source 1..20: mol_type = other RNA
ctctgccaagcctcacaaat

SEQ ID NO: 4305 - RNA, 20 nt, synthetic construct
  source 1..20: mol_type = other RNA
agattggcgagctgataaag

SEQ ID NO: 4306 - RNA, 20 nt, synthetic construct
  source 1..20: mol_type = other RNA
cctgatggaaaaaagcaaaa

SEQ ID NO: 4307 - RNA, 20 nt, synthetic construct
  source 1..20: mol_type = other RNA
atcaggagaaatccctccct

SEQ ID NO: 4308 - RNA, 20 nt, synthetic construct
  source 1..20: mol_type = other RNA
attttgcttttttccatcag

SEQ ID NO: 4309 - RNA, 20 nt, synthetic construct
  source 1..20: mol_type = other RNA
aatttacaaaagaatgttct

SEQ ID NO: 4310 - RNA, 20 nt, synthetic construct
  source 1..20: mol_type = other RNA
tttgtaaatttgaatttcta

SEQ ID NO: 4311 - RNA, 20 nt, synthetic construct
  source 1..20: mol_type = other RNA
cctttcctaatcaaacttac

SEQ ID NO: 4312 - RNA, 20 nt, synthetic construct
  source 1..20: mol_type = other RNA
ctactggggagcagtcatta

SEQ ID NO: 4313 - RNA, 20 nt, synthetic construct
  source 1..20: mol_type = other RNA
gatatgactaaagcactatt

SEQ ID NO: 4314 - RNA, 20 nt, synthetic construct
  source 1..20: mol_type = other RNA
ggttataaggaataagaaat

SEQ ID NO: 4315 - RNA, 20 nt, synthetic construct
  source 1..20: mol_type = other RNA
ttataaccagaaaatagtgc

SEQ ID NO: 4316 - RNA, 20 nt, synthetic construct
  source 1..20: mol_type = other RNA
tattccttataaccagaaaa

SEQ ID NO: 4317 - RNA, 20 nt, synthetic construct
  source 1..20: mol_type = other RNA
cacttgtaaatacgttgtgt

SEQ ID NO: 4318 - RNA, 20 nt, synthetic construct
  source 1..20: mol_type = other RNA
ggataaatgtgagacagtta

SEQ ID NO: 4319 - RNA, 20 nt, synthetic construct
  source 1..20: mol_type = other RNA
agtttaataatttttaactg

SEQ ID NO: 4320 - RNA, 20 nt, synthetic construct
  source 1..20: mol_type = other RNA
gagtggggtttctttttaaa

SEQ ID NO: 4321 - RNA, 20 nt, synthetic construct
  source 1..20: mol_type = other RNA
ttttaaaattcttgttatat

SEQ ID NO: 4322 - RNA, 20 nt, synthetic construct
  source 1..20: mol_type = other RNA
tgttatatatgaaatataat

SEQ ID NO: 4323 - RNA, 20 nt, synthetic construct
  source 1..20: mol_type = other RNA
tatataacaagaattttaaa

SEQ ID NO: 4324 - RNA, 20 nt, synthetic construct
  source 1..20: mol_type = other RNA
agtttagtgcaagttgagta

SEQ ID NO: 4325 - RNA, 20 nt, synthetic construct
  source 1..20: mol_type = other RNA
ttgatctctctagtaaggtt

SEQ ID NO: 4326 - RNA, 20 nt, synthetic construct
  source 1..20: mol_type = other RNA
agactataaaagcctaaaaa

SEQ ID NO: 4327 - RNA, 20 nt, synthetic construct
  source 1..20: mol_type = other RNA
gctttttaggcttttatagt

SEQ ID NO: 4328 - RNA, 20 nt, synthetic construct
  source 1..20: mol_type = other RNA
aggcactgttttaggtgtcg

SEQ ID NO: 4329 - RNA, 20 nt, synthetic construct
  source 1..20: mol_type = other RNA
ctgctgcgtcctcgacacct

SEQ ID NO: 4330 - RNA, 20 nt, synthetic construct
  source 1..20: mol_type = other RNA
gttttgttcactgctgcgtc

SEQ ID NO: 4331 - RNA, 20 nt, synthetic construct
  source 1..20: mol_type = other RNA
tctgttttgttcactgctgc

SEQ ID NO: 4332 - RNA, 20 nt, synthetic construct
  source 1..20: mol_type = other RNA
ggttaaaactaaaaagtgga

SEQ ID NO: 4333 - RNA, 20 nt, synthetic construct
  source 1..20: mol_type = other RNA
gacaactgtttcaaggagct

SEQ ID NO: 4334 - RNA, 20 nt, synthetic construct
  source 1..20: mol_type = other RNA
aggagctttgctgattttgg

SEQ ID NO: 4335 - RNA, 20 nt, synthetic construct
  source 1..20: mol_type = other RNA
aaaatcagcaaagctccttg

SEQ ID NO: 4336 - RNA, 20 nt, synthetic construct
  source 1..20: mol_type = other RNA
ccttccaaaatcagcaaagc

SEQ ID NO: 4337 - RNA, 20 nt, synthetic construct
  source 1..20: mol_type = other RNA
gttactgccccattctcctt

SEQ ID NO: 4338 - RNA, 20 nt, synthetic construct
  source 1..20: mol_type = other RNA
tgtttttaaatggaaattga

SEQ ID NO: 4339 - RNA, 20 nt, synthetic construct
  source 1..20: mol_type = other RNA
atttaaaaacaagaacttaa

SEQ ID NO: 4340 - RNA, 20 nt, synthetic construct
  source 1..20: mol_type = other RNA
tatgccatggagcaggtact

SEQ ID NO: 4341 - RNA, 20 nt, synthetic construct
  source 1..20: mol_type = other RNA
tcatatgccatggagcaggt

SEQ ID NO: 4342 - RNA, 20 nt, synthetic construct
  source 1..20: mol_type = other RNA
accagctccagcagcagcag

SEQ ID NO: 4343 - RNA, 20 nt, synthetic construct
  source 1..20: mol_type = other RNA
tcaaccagctccagcagcag

SEQ ID NO: 4344 - RNA, 20 nt, synthetic construct
  source 1..20: mol_type = other RNA
gcagattcttcaaccagctc

SEQ ID NO: 4345 - RNA, 20 nt, synthetic construct
  source 1..20: mol_type = other RNA
ggcagtgggaccccatctgg

SEQ ID NO: 4346 - RNA, 20 nt, synthetic construct
  source 1..20: mol_type = other RNA
ctgtaaggatttgttcatca

SEQ ID NO: 4347 - RNA, 20 nt, synthetic construct
  source 1..20: mol_type = other RNA
tcagaaaagcccagttggtg

SEQ ID NO: 4348 - RNA, 20 nt, synthetic construct
  source 1..20: mol_type = other RNA
gatgaacaaatccttacagt

SEQ ID NO: 4349 - RNA, 20 nt, synthetic construct
  source 1..20: mol_type = other RNA
ctgtcagctgcaaaaagtgg

SEQ ID NO: 4350 - RNA, 20 nt, synthetic construct
  source 1..20: mol_type = other RNA
taattattgagaggaaaagg

SEQ ID NO: 4351 - RNA, 20 nt, synthetic construct
  source 1..20: mol_type = other RNA
tctcaataattaagaaacca

SEQ ID NO: 4352 - RNA, 20 nt, synthetic construct
  source 1..20: mol_type = other RNA
ttttcctctcaataattaag

SEQ ID NO: 4353 - RNA, 20 nt, synthetic construct
  source 1..20: mol_type = other RNA
tcaaaactgcttatttaaac

SEQ ID NO: 4354 - RNA, 20 nt, synthetic construct
  source 1..20: mol_type = other RNA
accggacactccctatggtt

SEQ ID NO: 4355 - RNA, 20 nt, synthetic construct
  source 1..20: mol_type = other RNA
ttactgtgagcctgtaaaat

SEQ ID NO: 4356 - RNA, 20 nt, synthetic construct
  source 1..20: mol_type = other RNA
ctcacaacgtgtttaatttt

SEQ ID NO: 4357 - RNA, 20 nt, synthetic construct
  source 1..20: mol_type = other RNA
tttatttattcatttaaaca

SEQ ID NO: 4358 - RNA, 20 nt, synthetic construct
  source 1..20: mol_type = other RNA
tttcaggtctttattctaca

SEQ ID NO: 4359 - RNA, 20 nt, synthetic construct
  source 1..20: mol_type = other RNA
ggtctttattctacatttgt

SEQ ID NO: 4360 - RNA, 20 nt, synthetic construct
  source 1..20: mol_type = other RNA
acatttgtttaccaaactac

SEQ ID NO: 4361 - RNA, 20 nt, synthetic construct
  source 1..20: mol_type = other RNA
tgttgtcttattattttcat

SEQ ID NO: 4362 - RNA, 20 nt, synthetic construct
  source 1..20: mol_type = other RNA
taatgtaaacctacctcgac

SEQ ID NO: 4363 - RNA, 20 nt, synthetic construct
  source 1..20: mol_type = other RNA
ctgtcgaggtaggtttacat

SEQ ID NO: 4364 - RNA, 20 nt, synthetic construct
  source 1..20: mol_type = other RNA
tggacatcttttaaccctta

SEQ ID NO: 4365 - RNA, 20 nt, synthetic construct
  source 1..20: mol_type = other RNA
acctcatggtgcctcatttc

SEQ ID NO: 4366 - RNA, 20 nt, synthetic construct
  source 1..20: mol_type = other RNA
tggaacagagtaaaaatcct

SEQ ID NO: 4367 - RNA, 20 nt, synthetic construct
  source 1..20: mol_type = other RNA
acgaactattctacctcatg

SEQ ID NO: 4368 - RNA, 20 nt, synthetic construct
  source 1..20: mol_type = other RNA
ttttttaaggatttttactc

SEQ ID NO: 4369 - RNA, 20 nt, synthetic construct
  source 1..20: mol_type = other RNA
tttttttaagatgtatgttg

SEQ ID NO: 4370 - RNA, 20 nt, synthetic construct
  source 1..20: mol_type = other RNA
ggcagagcgctatgtgatca

SEQ ID NO: 4371 - RNA, 20 nt, synthetic construct
  source 1..20: mol_type = other RNA
aatacattttaatacttttt

SEQ ID NO: 4372 - RNA, 20 nt, synthetic construct
  source 1..20: mol_type = other RNA
ttcttgataaattaatggac

SEQ ID NO: 4373 - RNA, 20 nt, synthetic construct
  source 1..20: mol_type = other RNA
gtgaacacatgaaatctgac

SEQ ID NO: 4374 - RNA, 20 nt, synthetic construct
  source 1..20: mol_type = other RNA
cagaattgtatatcatattt

SEQ ID NO: 4375 - RNA, 20 nt, synthetic construct
  source 1..20: mol_type = other RNA
tgtgttcacagaattgtata

SEQ ID NO: 4376 - RNA, 20 nt, synthetic construct
  source 1..20: mol_type = other RNA
gaactgcctgagaattagaa

SEQ ID NO: 4377 - RNA, 20 nt, synthetic construct
  source 1..20: mol_type = other RNA
gaactttgtcagatttcatg

SEQ ID NO: 4378 - RNA, 20 nt, synthetic construct
  source 1..20: mol_type = other RNA
caggcagttcagaactttgt

SEQ ID NO: 4379 - RNA, 20 nt, synthetic construct
  source 1..20: mol_type = other RNA
aattctcaggcagttcagaa

SEQ ID NO: 4380 - RNA, 20 nt, synthetic construct
  source 1..20: mol_type = other RNA
attaaatatacttaacagag

SEQ ID NO: 4381 - RNA, 20 nt, synthetic construct
  source 1..20: mol_type = other RNA
aaattattccagtctatggg

SEQ ID NO: 4382 - RNA, 20 nt, synthetic construct
  source 1..20: mol_type = other RNA
agtctatgggcaagaactag

SEQ ID NO: 4383 - RNA, 20 nt, synthetic construct
  source 1..20: mol_type = other RNA
tgcccatagactggaataat

SEQ ID NO: 4384 - RNA, 20 nt, synthetic construct
  source 1..20: mol_type = other RNA
agttcttgcccatagactgg

SEQ ID NO: 4385 - RNA, 20 nt, synthetic construct
  source 1..20: mol_type = other RNA
agttctagttcttgcccata

SEQ ID NO: 4386 - RNA, 20 nt, synthetic construct
  source 1..20: mol_type = other RNA
gacgaaaaatttttagaaaa

SEQ ID NO: 4387 - RNA, 20 nt, synthetic construct
  source 1..20: mol_type = other RNA
tctgaatttcaagttctagt

SEQ ID NO: 4388 - RNA, 20 nt, synthetic construct
  source 1..20: mol_type = other RNA
aaaaatttttcgtctgaatt

SEQ ID NO: 4389 - RNA, 20 nt, synthetic construct
  source 1..20: mol_type = other RNA
gtatccataattgttccaac

SEQ ID NO: 4390 - RNA, 20 nt, synthetic construct
  source 1..20: mol_type = other RNA
ttccaaactagtgaaatgag

SEQ ID NO: 4391 - RNA, 20 nt, synthetic construct
  source 1..20: mol_type = other RNA
aaactagtgaaatgagataa

SEQ ID NO: 4392 - RNA, 20 nt, synthetic construct
  source 1..20: mol_type = other RNA
ctagtttggaaagaactttt

SEQ ID NO: 4393 - RNA, 20 nt, synthetic construct
  source 1..20: mol_type = other RNA
ggttcaaattcgactttgaa

SEQ ID NO: 4394 - RNA, 20 nt, synthetic construct
  source 1..20: mol_type = other RNA
aattcgactttgaagctata

SEQ ID NO: 4395 - RNA, 20 nt, synthetic construct
  source 1..20: mol_type = other RNA
actttgaagctatatattct

SEQ ID NO: 4396 - RNA, 20 nt, synthetic construct
  source 1..20: mol_type = other RNA
tatttggtggactacagaga

SEQ ID NO: 4397 - RNA, 20 nt, synthetic construct
  source 1..20: mol_type = other RNA
gaataaaaagcacttagtaa

SEQ ID NO: 4398 - RNA, 20 nt, synthetic construct
  source 1..20: mol_type = other RNA
gaatcatttcatatttggtg

SEQ ID NO: 4399 - RNA, 20 nt, synthetic construct
  source 1..20: mol_type = other RNA
ctttactaagtgctttttat

SEQ ID NO: 4400 - RNA, 20 nt, synthetic construct
  source 1..20: mol_type = other RNA
actcatgataagaacactaa

SEQ ID NO: 4401 - RNA, 20 nt, synthetic construct
  source 1..20: mol_type = other RNA
gccatttaaaaaagaagtct

SEQ ID NO: 4402 - RNA, 20 nt, synthetic construct
  source 1..20: mol_type = other RNA
tttttaaatggcagaagtaa

SEQ ID NO: 4403 - RNA, 20 nt, synthetic construct
  source 1..20: mol_type = other RNA
cagacttcttttttaaatgg

SEQ ID NO: 4404 - RNA, 20 nt, synthetic construct
  source 1..20: mol_type = other RNA
ttcatattaacaaagtacag

SEQ ID NO: 4405 - RNA, 20 nt, synthetic construct
  source 1..20: mol_type = other RNA
tattaacaaagtacagtgac

SEQ ID NO: 4406 - RNA, 20 nt, synthetic construct
  source 1..20: mol_type = other RNA
attcttcttttttaaaatga

SEQ ID NO: 4407 - RNA, 20 nt, synthetic construct
  source 1..20: mol_type = other RNA
tccattcttcttttttaaaa

SEQ ID NO: 4408 - RNA, 20 nt, synthetic construct
  source 1..20: mol_type = other RNA
cctttttaaaggaaggcttt

SEQ ID NO: 4409 - RNA, 20 nt, synthetic construct
  source 1..20: mol_type = other RNA
tttaaaaaggggaatcaaag

SEQ ID NO: 4410 - RNA, 20 nt, synthetic construct
  source 1..20: mol_type = other RNA
tttgcttgttaaagccttcc

SEQ ID NO: 4411 - RNA, 20 nt, synthetic construct
  source 1..20: mol_type = other RNA
caacgggatattcctttgct

SEQ ID NO: 4412 - RNA, 20 nt, synthetic construct
  source 1..20: mol_type = other RNA
tattcacaacgggatattcc

SEQ ID NO: 4413 - RNA, 20 nt, synthetic construct
  source 1..20: mol_type = other RNA
agagtagagaaagactctat

SEQ ID NO: 4414 - RNA, 20 nt, synthetic construct
  source 1..20: mol_type = other RNA
ctactctagaatggctattc

SEQ ID NO: 4415 - RNA, 20 nt, synthetic construct
  source 1..20: mol_type = other RNA
cagagcactcgccagttttc

SEQ ID NO: 4416 - RNA, 20 nt, synthetic construct
  source 1..20: mol_type = other RNA
cacaaacatttggggataaa

SEQ ID NO: 4417 - RNA, 20 nt, synthetic construct
  source 1..20: mol_type = other RNA
cactaaaaattattttgaaa

SEQ ID NO: 4418 - RNA, 20 nt, synthetic construct
  source 1..20: mol_type = other RNA
aaataatttttagtgagaac

SEQ ID NO: 4419 - RNA, 20 nt, synthetic construct
  source 1..20: mol_type = other RNA
aataataaaagtatttttca

SEQ ID NO: 4420 - RNA, 20 nt, synthetic construct
  source 1..20: mol_type = other RNA
acttcattctgcttacccta

SEQ ID NO: 4421 - RNA, 20 nt, synthetic construct
  source 1..20: mol_type = other RNA
ttctgcttaccctattaatg

SEQ ID NO: 4422 - RNA, 20 nt, synthetic construct
  source 1..20: mol_type = other RNA
gcttaccctattaatgccct

SEQ ID NO: 4423 - RNA, 20 nt, synthetic construct
  source 1..20: mol_type = other RNA
aggagaaaagctatatctaa

SEQ ID NO: 4424 - RNA, 20 nt, synthetic construct
  source 1..20: mol_type = other RNA
aaacagtaagttattcatac

SEQ ID NO: 4425 - RNA, 20 nt, synthetic construct
  source 1..20: mol_type = other RNA
tactacatagaataaaagta

SEQ ID NO: 4426 - RNA, 20 nt, synthetic construct
  source 1..20: mol_type = other RNA
atgtagtatgaataacttac

SEQ ID NO: 4427 - RNA, 20 nt, synthetic construct
  source 1..20: mol_type = other RNA
ttttacttttattctatgta

SEQ ID NO: 4428 - RNA, 20 nt, synthetic construct
  source 1..20: mol_type = other RNA
tgttttagtttttatttgat

SEQ ID NO: 4429 - RNA, 20 nt, synthetic construct
  source 1..20: mol_type = other RNA
ctgtccctatccttctacct

SEQ ID NO: 4430 - RNA, 20 nt, synthetic construct
  source 1..20: mol_type = other RNA
gtgtgtaggtcatcaccagg

SEQ ID NO: 4431 - RNA, 20 nt, synthetic construct
  source 1..20: mol_type = other RNA
aaagaggcacagattcaggg

SEQ ID NO: 4432 - RNA, 20 nt, synthetic construct
  source 1..20: mol_type = other RNA
gggatgtatgatggggaaca

SEQ ID NO: 4433 - RNA, 20 nt, synthetic construct
  source 1..20: mol_type = other RNA
cttctgatcacttacctata

SEQ ID NO: 4434 - RNA, 20 nt, synthetic construct
  source 1..20: mol_type = other RNA
gatcacttacctataaggag

SEQ ID NO: 4435 - RNA, 20 nt, synthetic construct
  source 1..20: mol_type = other RNA
gtctccttataggtaagtga

SEQ ID NO: 4436 - RNA, 20 nt, synthetic construct
  source 1..20: mol_type = other RNA
gcacttggtggccccactct

SEQ ID NO: 4437 - RNA, 20 nt, synthetic construct
  source 1..20: mol_type = other RNA
ctatcagggtttctcaacct

SEQ ID NO: 4438 - RNA, 20 nt, synthetic construct
  source 1..20: mol_type = other RNA
caacctggactctagtgaca

SEQ ID NO: 4439 - RNA, 20 nt, synthetic construct
  source 1..20: mol_type = other RNA
ggacaggataatttgctgtt

SEQ ID NO: 4440 - RNA, 20 nt, synthetic construct
  source 1..20: mol_type = other RNA
aatacttgaattttttttat

SEQ ID NO: 4441 - RNA, 20 nt, synthetic construct
  source 1..20: mol_type = other RNA
aataccccttatgaggtccc

SEQ ID NO: 4442 - RNA, 20 nt, synthetic construct
  source 1..20: mol_type = other RNA
agtattcgaataccccttat

SEQ ID NO: 4443 - RNA, 20 nt, synthetic construct
  source 1..20: mol_type = other RNA
atccaaatatgtcattataa

SEQ ID NO: 4444 - RNA, 20 nt, synthetic construct
  source 1..20: mol_type = other RNA
ctaattgtgacttctatcca

SEQ ID NO: 4445 - RNA, 20 nt, synthetic construct
  source 1..20: mol_type = other RNA
aataagttaagctttctggt

SEQ ID NO: 4446 - RNA, 20 nt, synthetic construct
  source 1..20: mol_type = other RNA
aaaagcataaaatgctactg

SEQ ID NO: 4447 - RNA, 20 nt, synthetic construct
  source 1..20: mol_type = other RNA
gttgatatgcttaagtttta

SEQ ID NO: 4448 - RNA, 20 nt, synthetic construct
  source 1..20: mol_type = other RNA
tattcagttgatatgcttaa

SEQ ID NO: 4449 - RNA, 20 nt, synthetic construct
  source 1..20: mol_type = other RNA
agcatgacggttaaagcctt

SEQ ID NO: 4450 - RNA, 20 nt, synthetic construct
  source 1..20: mol_type = other RNA
aatggacaaagacaaccaat

SEQ ID NO: 4451 - RNA, 20 nt, synthetic construct
  source 1..20: mol_type = other RNA
cctagttataccataaatgt

SEQ ID NO: 4452 - RNA, 20 nt, synthetic construct
  source 1..20: mol_type = other RNA
tgtttcacctagttatacca

SEQ ID NO: 4453 - RNA, 20 nt, synthetic construct
  source 1..20: mol_type = other RNA
tcatgtttcacctagttata

SEQ ID NO: 4454 - RNA, 20 nt, synthetic construct
  source 1..20: mol_type = other RNA
taattttatatttttagata

SEQ ID NO: 4455 - RNA, 20 nt, synthetic construct
  source 1..20: mol_type = other RNA
ttcataattttatattttta

SEQ ID NO: 4456 - RNA, 20 nt, synthetic construct
  source 1..20: mol_type = other RNA
aatcttgtgtagcaatcagc

SEQ ID NO: 4457 - RNA, 20 nt, synthetic construct
  source 1..20: mol_type = other RNA
ttgctgattgctacacaaga

SEQ ID NO: 4458 - RNA, 20 nt, synthetic construct
  source 1..20: mol_type = other RNA
tatgtaaagatactgaatcc

SEQ ID NO: 4459 - RNA, 20 nt, synthetic construct
  source 1..20: mol_type = other RNA
gtatctttacataagaaatt

SEQ ID NO: 4460 - RNA, 20 nt, synthetic construct
  source 1..20: mol_type = other RNA
ggattcagtatctttacata

SEQ ID NO: 4461 - RNA, 20 nt, synthetic construct
  source 1..20: mol_type = other RNA
atatactctttcaggattca

SEQ ID NO: 4462 - RNA, 20 nt, synthetic construct
  source 1..20: mol_type = other RNA
ggacaaaatatcaaaataaa

SEQ ID NO: 4463 - RNA, 20 nt, synthetic construct
  source 1..20: mol_type = other RNA
ttattttgatattttgtcct

SEQ ID NO: 4464 - RNA, 20 nt, synthetic construct
  source 1..20: mol_type = other RNA
ttccttagatacctaccttc

SEQ ID NO: 4465 - RNA, 20 nt, synthetic construct
  source 1..20: mol_type = other RNA
ttagatacctaccttcttta

SEQ ID NO: 4466 - RNA, 20 nt, synthetic construct
  source 1..20: mol_type = other RNA
ttaatctaggatttagatta

SEQ ID NO: 4467 - RNA, 20 nt, synthetic construct
  source 1..20: mol_type = other RNA
gctaatcataaactatagtt

SEQ ID NO: 4468 - RNA, 20 nt, synthetic construct
  source 1..20: mol_type = other RNA
ttagcaatttcttcatcagg

SEQ ID NO: 4469 - RNA, 20 nt, synthetic construct
  source 1..20: mol_type = other RNA
tcatcaggtgattccatggc

SEQ ID NO: 4470 - RNA, 20 nt, synthetic construct
  source 1..20: mol_type = other RNA
tcaggtgattccatggctat

SEQ ID NO: 4471 - RNA, 20 nt, synthetic construct
  source 1..20: mol_type = other RNA
atggctattttccaaatgaa

SEQ ID NO: 4472 - RNA, 20 nt, synthetic construct
  source 1..20: mol_type = other RNA
aaatgaaatccattcctatc

SEQ ID NO: 4473 - RNA, 20 nt, synthetic construct
  source 1..20: mol_type = other RNA
tttggaaaatagccatggaa

SEQ ID NO: 4474 - RNA, 20 nt, synthetic construct
  source 1..20: mol_type = other RNA
tatcaattccagcttttcta

SEQ ID NO: 4475 - RNA, 20 nt, synthetic construct
  source 1..20: mol_type = other RNA
agcttttctacatactgttc

SEQ ID NO: 4476 - RNA, 20 nt, synthetic construct
  source 1..20: mol_type = other RNA
acatactgttcaaaagaaaa

SEQ ID NO: 4477 - RNA, 20 nt, synthetic construct
  source 1..20: mol_type = other RNA
aaagaaaaaaaattaaatta

SEQ ID NO: 4478 - RNA, 20 nt, synthetic construct
  source 1..20: mol_type = other RNA
tttgaacagtatgtagaaaa

SEQ ID NO: 4479 - RNA, 20 nt, synthetic construct
  source 1..20: mol_type = other RNA
gttcaatatgaattaaggct

SEQ ID NO: 4480 - RNA, 20 nt, synthetic construct
  source 1..20: mol_type = other RNA
atatgaattaaggctgcaaa

SEQ ID NO: 4481 - RNA, 20 nt, synthetic construct
  source 1..20: mol_type = other RNA
tattgaactgaagaggtgtg

SEQ ID NO: 4482 - RNA, 20 nt, synthetic construct
  source 1..20: mol_type = other RNA
tatagctgaggttttgcagc

SEQ ID NO: 4483 - RNA, 20 nt, synthetic construct
  source 1..20: mol_type = other RNA
atatcagtataatattattt

SEQ ID NO: 4484 - RNA, 20 nt, synthetic construct
  source 1..20: mol_type = other RNA
gtggttggttgctttttaaa

SEQ ID NO: 4485 - RNA, 20 nt, synthetic construct
  source 1..20: mol_type = other RNA
acgggaaccaggataggtac

SEQ ID NO: 4486 - RNA, 20 nt, synthetic construct
  source 1..20: mol_type = other RNA
caaatctagatagtttggat

SEQ ID NO: 4487 - RNA, 20 nt, synthetic construct
  source 1..20: mol_type = other RNA
atcgatgatcacaaagattc

SEQ ID NO: 4488 - RNA, 20 nt, synthetic construct
  source 1..20: mol_type = other RNA
cattttcaaaaaaagtttta

SEQ ID NO: 4489 - RNA, 20 nt, synthetic construct
  source 1..20: mol_type = other RNA
aaaaaagttttaaataagtt

SEQ ID NO: 4490 - RNA, 20 nt, synthetic construct
  source 1..20: mol_type = other RNA
ataattacaggttttaactt

SEQ ID NO: 4491 - RNA, 20 nt, synthetic construct
  source 1..20: mol_type = other RNA
tgtactctacgtaacacaga

SEQ ID NO: 4492 - RNA, 20 nt, synthetic construct
  source 1..20: mol_type = other RNA
catcctcaacaatacttgtt

SEQ ID NO: 4493 - RNA, 20 nt, synthetic construct
  source 1..20: mol_type = other RNA
tcacatcctcaacaatactt

SEQ ID NO: 4494 - RNA, 20 nt, synthetic construct
  source 1..20: mol_type = other RNA
aatttcttcacatcctcaac

SEQ ID NO: 4495 - RNA, 20 nt, synthetic construct
  source 1..20: mol_type = other RNA
taatcccaccagcaatatat

SEQ ID NO: 4496 - RNA, 20 nt, synthetic construct
  source 1..20: mol_type = other RNA
tgaaaggttaattatatgtc

SEQ ID NO: 4497 - RNA, 20 nt, synthetic construct
  source 1..20: mol_type = other RNA
ggaactgtctgttttgcaaa

SEQ ID NO: 4498 - RNA, 20 nt, synthetic construct
  source 1..20: mol_type = other RNA
gacatataattaacctttca

SEQ ID NO: 4499 - RNA, 20 nt, synthetic construct
  source 1..20: mol_type = other RNA
agatatacatccaagagaaa

SEQ ID NO: 4500 - RNA, 20 nt, synthetic construct
  source 1..20: mol_type = other RNA
cttggatgtatatctagaag

SEQ ID NO: 4501 - RNA, 20 nt, synthetic construct
  source 1..20: mol_type = other RNA
tgtagaaaggaatttgagta

SEQ ID NO: 4502 - RNA, 20 nt, synthetic construct
  source 1..20: mol_type = other RNA
acatgaatggtatcttataa

SEQ ID NO: 4503 - RNA, 20 nt, synthetic construct
  source 1..20: mol_type = other RNA
tttctacatgaatggtatct

SEQ ID NO: 4504 - RNA, 20 nt, synthetic construct
  source 1..20: mol_type = other RNA
gtacttttaagtaagaagtg

SEQ ID NO: 4505 - RNA, 20 nt, synthetic construct
  source 1..20: mol_type = other RNA
taccattcatagtgatttca

SEQ ID NO: 4506 - RNA, 20 nt, synthetic construct
  source 1..20: mol_type = other RNA
tagtgatttcatatgactcc

SEQ ID NO: 4507 - RNA, 20 nt, synthetic construct
  source 1..20: mol_type = other RNA
tatgactccaatttaagaat

SEQ ID NO: 4508 - RNA, 20 nt, synthetic construct
  source 1..20: mol_type = other RNA
taaattggagtcatatgaaa

SEQ ID NO: 4509 - RNA, 20 nt, synthetic construct
  source 1..20: mol_type = other RNA
ccttgaagagctgctgctga

SEQ ID NO: 4510 - RNA, 20 nt, synthetic construct
  source 1..20: mol_type = other RNA
aggagaaaattcttaaattg

SEQ ID NO: 4511 - RNA, 20 nt, synthetic construct
  source 1..20: mol_type = other RNA
gcagcagctcttcaaggaga

SEQ ID NO: 4512 - RNA, 20 nt, synthetic construct
  source 1..20: mol_type = other RNA
aaacacatctgtggaataag

SEQ ID NO: 4513 - RNA, 20 nt, synthetic construct
  source 1..20: mol_type = other RNA
acagatgtgttttgaatggt

SEQ ID NO: 4514 - RNA, 20 nt, synthetic construct
  source 1..20: mol_type = other RNA
tcttattccacagatgtgtt

SEQ ID NO: 4515 - RNA, 20 nt, synthetic construct
  source 1..20: mol_type = other RNA
aagcattttagctttgagtg

SEQ ID NO: 4516 - RNA, 20 nt, synthetic construct
  source 1..20: mol_type = other RNA
gaaattaaatgaagcagtta

SEQ ID NO: 4517 - RNA, 20 nt, synthetic construct
  source 1..20: mol_type = other RNA
gaattccaagcattttagct

SEQ ID NO: 4518 - RNA, 20 nt, synthetic construct
  source 1..20: mol_type = other RNA
tttaatttcagaattccaag

SEQ ID NO: 4519 - RNA, 20 nt, synthetic construct
  source 1..20: mol_type = other RNA
gccttactttatccacaata

SEQ ID NO: 4520 - RNA, 20 nt, synthetic construct
  source 1..20: mol_type = other RNA
tacctctctatctaattcac

SEQ ID NO: 4521 - RNA, 20 nt, synthetic construct
  source 1..20: mol_type = other RNA
caaacatcctggccagttac

SEQ ID NO: 4522 - RNA, 20 nt, synthetic construct
  source 1..20: mol_type = other RNA
agcccagatacagagtagct

SEQ ID NO: 4523 - RNA, 20 nt, synthetic construct
  source 1..20: mol_type = other RNA
tgcaagaaaaacgctagaaa

SEQ ID NO: 4524 - RNA, 20 nt, synthetic construct
  source 1..20: mol_type = other RNA
tgcaagaagctactctgtat

SEQ ID NO: 4525 - RNA, 20 nt, synthetic construct
  source 1..20: mol_type = other RNA
agcgtttttcttgcaagaag

SEQ ID NO: 4526 - RNA, 20 nt, synthetic construct
  source 1..20: mol_type = other RNA
ttttgcagtatttagaggca

SEQ ID NO: 4527 - RNA, 20 nt, synthetic construct
  source 1..20: mol_type = other RNA
ttcctaaaagcaacattaaa

SEQ ID NO: 4528 - RNA, 20 nt, synthetic construct
  source 1..20: mol_type = other RNA
taaaagcaacattaaaacaa

SEQ ID NO: 4529 - RNA, 20 nt, synthetic construct
  source 1..20: mol_type = other RNA
tgatttacaacattaatttg

SEQ ID NO: 4530 - RNA, 20 nt, synthetic construct
  source 1..20: mol_type = other RNA
cgttaccaatttcactattt

SEQ ID NO: 4531 - RNA, 20 nt, synthetic construct
  source 1..20: mol_type = other RNA
ctatttcaaaattcttcttc

SEQ ID NO: 4532 - RNA, 20 nt, synthetic construct
  source 1..20: mol_type = other RNA
aaattcttcttcaagtcttg

SEQ ID NO: 4533 - RNA, 20 nt, synthetic construct
  source 1..20: mol_type = other RNA
tcttcaagtcttgaataatg

SEQ ID NO: 4534 - RNA, 20 nt, synthetic construct
  source 1..20: mol_type = other RNA
tcaagtcttgaataatgctc

SEQ ID NO: 4535 - RNA, 20 nt, synthetic construct
  source 1..20: mol_type = other RNA
agtcttgaataatgctcttg

SEQ ID NO: 4536 - RNA, 20 nt, synthetic construct
  source 1..20: mol_type = other RNA
agacttgaagaagaattttg

SEQ ID NO: 4537 - RNA, 20 nt, synthetic construct
  source 1..20: mol_type = other RNA
ccaagagcattattcaagac

SEQ ID NO: 4538 - RNA, 20 nt, synthetic construct
  source 1..20: mol_type = other RNA
ttttgttattttcgccaaga

SEQ ID NO: 4539 - RNA, 20 nt, synthetic construct
  source 1..20: mol_type = other RNA
cattaccacttttctttttg

SEQ ID NO: 4540 - RNA, 20 nt, synthetic construct
  source 1..20: mol_type = other RNA
taaaacaaacctatcaaaag

SEQ ID NO: 4541 - RNA, 20 nt, synthetic construct
  source 1..20: mol_type = other RNA
tggagctgacgcaaagctgg

SEQ ID NO: 4542 - RNA, 20 nt, synthetic construct
  source 1..20: mol_type = other RNA
ttttaactctagtcatctca

SEQ ID NO: 4543 - RNA, 20 nt, synthetic construct
  source 1..20: mol_type = other RNA
aaatttaattaatgtaactt

SEQ ID NO: 4544 - RNA, 20 nt, synthetic construct
  source 1..20: mol_type = other RNA
tttattagctataaaaaatt

SEQ ID NO: 4545 - RNA, 20 nt, synthetic construct
  source 1..20: mol_type = other RNA
agtcaatcaggtttactgtt

SEQ ID NO: 4546 - RNA, 20 nt, synthetic construct
  source 1..20: mol_type = other RNA
gtcttcaacttcttattctg

SEQ ID NO: 4547 - RNA, 20 nt, synthetic construct
  source 1..20: mol_type = other RNA
acttcttattctgcatgcaa

SEQ ID NO: 4548 - RNA, 20 nt, synthetic construct
  source 1..20: mol_type = other RNA
tattctgcatgcaatttcct

SEQ ID NO: 4549 - RNA, 20 nt, synthetic construct
  source 1..20: mol_type = other RNA
gcatgcaatttcctaaagct

SEQ ID NO: 4550 - RNA, 20 nt, synthetic construct
  source 1..20: mol_type = other RNA
taaagctaagaactgcaaac

SEQ ID NO: 4551 - RNA, 20 nt, synthetic construct
  source 1..20: mol_type = other RNA
tagctttaggaaattgcatg

SEQ ID NO: 4552 - RNA, 20 nt, synthetic construct
  source 1..20: mol_type = other RNA
catccactcctgtttgcagt

SEQ ID NO: 4553 - RNA, 20 nt, synthetic construct
  source 1..20: mol_type = other RNA
ttgttgtctgttttttgctg

SEQ ID NO: 4554 - RNA, 20 nt, synthetic construct
  source 1..20: mol_type = other RNA
gaggatagattaagtagcac

SEQ ID NO: 4555 - RNA, 20 nt, synthetic construct
  source 1..20: mol_type = other RNA
gtgttatccaagttaagctt

SEQ ID NO: 4556 - RNA, 20 nt, synthetic construct
  source 1..20: mol_type = other RNA
tactccattttacttaccat

SEQ ID NO: 4557 - RNA, 20 nt, synthetic construct
  source 1..20: mol_type = other RNA
atgattatatgactaggata

SEQ ID NO: 4558 - RNA, 20 nt, synthetic construct
  source 1..20: mol_type = other RNA
ttaatatttagaccactacc

SEQ ID NO: 4559 - RNA, 20 nt, synthetic construct
  source 1..20: mol_type = other RNA
taatctgtatttcctagtta

SEQ ID NO: 4560 - RNA, 20 nt, synthetic construct
  source 1..20: mol_type = other RNA
tagttaaaacactttcataa

SEQ ID NO: 4561 - RNA, 20 nt, synthetic construct
  source 1..20: mol_type = other RNA
taagaggtaattctattttt

SEQ ID NO: 4562 - RNA, 20 nt, synthetic construct
  source 1..20: mol_type = other RNA
atttttattattacagacat

SEQ ID NO: 4563 - RNA, 20 nt, synthetic construct
  source 1..20: mol_type = other RNA
aaacacttccaaatatatta

SEQ ID NO: 4564 - RNA, 20 nt, synthetic construct
  source 1..20: mol_type = other RNA
aaatatattatttctgaaac

SEQ ID NO: 4565 - RNA, 20 nt, synthetic construct
  source 1..20: mol_type = other RNA
gaaactggtatatgacaatc

SEQ ID NO: 4566 - RNA, 20 nt, synthetic construct
  source 1..20: mol_type = other RNA
gaaataatatatttggaagt

SEQ ID NO: 4567 - RNA, 20 nt, synthetic construct
  source 1..20: mol_type = other RNA
ctttataaagagtattacac

SEQ ID NO: 4568 - RNA, 20 nt, synthetic construct
  source 1..20: mol_type = other RNA
aactatgaaatttcaaaatt

SEQ ID NO: 4569 - RNA, 20 nt, synthetic construct
  source 1..20: mol_type = other RNA
tagtttgaaagatgctattt

SEQ ID NO: 4570 - RNA, 20 nt, synthetic construct
  source 1..20: mol_type = other RNA
aaatttggtaagaatttcag

SEQ ID NO: 4571 - RNA, 20 nt, synthetic construct
  source 1..20: mol_type = other RNA
taccaaattttgaaatttca

SEQ ID NO: 4572 - RNA, 20 nt, synthetic construct
  source 1..20: mol_type = other RNA
gtttaaacatgactattaaa

SEQ ID NO: 4573 - RNA, 20 nt, synthetic construct
  source 1..20: mol_type = other RNA
cctccacaagggtcttcatc

SEQ ID NO: 4574 - RNA, 20 nt, synthetic construct
  source 1..20: mol_type = other RNA
ctacaaagacaacaaaagtg

SEQ ID NO: 4575 - RNA, 20 nt, synthetic construct
  source 1..20: mol_type = other RNA
atagtgagatgtttctctac

SEQ ID NO: 4576 - RNA, 20 nt, synthetic construct
  source 1..20: mol_type = other RNA
ttgcctcatagggatcagcc

SEQ ID NO: 4577 - RNA, 20 nt, synthetic construct
  source 1..20: mol_type = other RNA
tagattctaagacaaagatt

SEQ ID NO: 4578 - RNA, 20 nt, synthetic construct
  source 1..20: mol_type = other RNA
aagacaaagatttcatatat

SEQ ID NO: 4579 - RNA, 20 nt, synthetic construct
  source 1..20: mol_type = other RNA
tatattttaacatatctgaa

SEQ ID NO: 4580 - RNA, 20 nt, synthetic construct
  source 1..20: mol_type = other RNA
gatatgttaaaatatatgaa

SEQ ID NO: 4581 - RNA, 20 nt, synthetic construct
  source 1..20: mol_type = other RNA
tttgacataattgtctaaag

SEQ ID NO: 4582 - RNA, 20 nt, synthetic construct
  source 1..20: mol_type = other RNA
gaagtcaggagaagctggca

SEQ ID NO: 4583 - RNA, 20 nt, synthetic construct
  source 1..20: mol_type = other RNA
gaaaatgctttagtgtgaga

SEQ ID NO: 4584 - RNA, 20 nt, synthetic construct
  source 1..20: mol_type = other RNA
cctgacttcggaaaatgctt

SEQ ID NO: 4585 - RNA, 20 nt, synthetic construct
  source 1..20: mol_type = other RNA
cagggtatgagtctgtcatg

SEQ ID NO: 4586 - RNA, 20 nt, synthetic construct
  source 1..20: mol_type = other RNA
agagaaggtgtttaacttgt

SEQ ID NO: 4587 - RNA, 20 nt, synthetic construct
  source 1..20: mol_type = other RNA
cttgaaataaggtgcagctt

SEQ ID NO: 4588 - RNA, 20 nt, synthetic construct
  source 1..20: mol_type = other RNA
taattgagttatgtacacta

SEQ ID NO: 4589 - RNA, 20 nt, synthetic construct
  source 1..20: mol_type = other RNA
cttttgtaaaactcaacttg

SEQ ID NO: 4590 - RNA, 20 nt, synthetic construct
  source 1..20: mol_type = other RNA
tcaacatgcctcaaaattat

SEQ ID NO: 4591 - RNA, 20 nt, synthetic construct
  source 1..20: mol_type = other RNA
aagatgccagtgattgcacc

SEQ ID NO: 4592 - RNA, 20 nt, synthetic construct
  source 1..20: mol_type = other RNA
gtgattctaagatgccagtg

SEQ ID NO: 4593 - RNA, 20 nt, synthetic construct
  source 1..20: mol_type = other RNA
ggctacactataaaagttgc

SEQ ID NO: 4594 - RNA, 20 nt, synthetic construct
  source 1..20: mol_type = other RNA
caaaaggattacaaaattgg

SEQ ID NO: 4595 - RNA, 20 nt, synthetic construct
  source 1..20: mol_type = other RNA
tatttatgtcccaattttgt

SEQ ID NO: 4596 - RNA, 20 nt, synthetic construct
  source 1..20: mol_type = other RNA
gcaagaagcaaatatattaa

SEQ ID NO: 4597 - RNA, 20 nt, synthetic construct
  source 1..20: mol_type = other RNA
tgctgaagagttcatattta

SEQ ID NO: 4598 - RNA, 20 nt, synthetic construct
  source 1..20: mol_type = other RNA
atattaaataaaaatattgt

SEQ ID NO: 4599 - RNA, 20 nt, synthetic construct
  source 1..20: mol_type = other RNA
aaggataattttcaatatta

SEQ ID NO: 4600 - RNA, 20 nt, synthetic construct
  source 1..20: mol_type = other RNA
aagaaaaagtctataaaact

SEQ ID NO: 4601 - RNA, 20 nt, synthetic construct
  source 1..20: mol_type = other RNA
ttgaattttattgtataaca

SEQ ID NO: 4602 - RNA, 20 nt, synthetic construct
  source 1..20: mol_type = other RNA
taaattttagttttatagac

SEQ ID NO: 4603 - RNA, 20 nt, synthetic construct
  source 1..20: mol_type = other RNA
gatatagccttcttaaagtt

SEQ ID NO: 4604 - RNA, 20 nt, synthetic construct
  source 1..20: mol_type = other RNA
taaagtttagcaaacaggaa

SEQ ID NO: 4605 - RNA, 20 nt, synthetic construct
  source 1..20: mol_type = other RNA
tgtttgctaaactttaagaa

SEQ ID NO: 4606 - RNA, 20 nt, synthetic construct
  source 1..20: mol_type = other RNA
tcttatctatgacgtggtga

SEQ ID NO: 4607 - RNA, 20 nt, synthetic construct
  source 1..20: mol_type = other RNA
tataacttgtcaccacgtca

SEQ ID NO: 4608 - RNA, 20 nt, synthetic construct
  source 1..20: mol_type = other RNA
ccaattacaatgaagatatc

SEQ ID NO: 4609 - RNA, 20 nt, synthetic construct
  source 1..20: mol_type = other RNA
ttgtaattggagaagagtaa

SEQ ID NO: 4610 - RNA, 20 nt, synthetic construct
  source 1..20: mol_type = other RNA
taagtaggacctgatgggat

SEQ ID NO: 4611 - RNA, 20 nt, synthetic construct
  source 1..20: mol_type = other RNA
tctaatgttgagtccaattt

SEQ ID NO: 4612 - RNA, 20 nt, synthetic construct
  source 1..20: mol_type = other RNA
gaatcatcagaatgtcatag

SEQ ID NO: 4613 - RNA, 20 nt, synthetic construct
  source 1..20: mol_type = other RNA
tcagaatgtcatagagaaat

SEQ ID NO: 4614 - RNA, 20 nt, synthetic construct
  source 1..20: mol_type = other RNA
gaatgtcatagagaaataat

SEQ ID NO: 4615 - RNA, 20 nt, synthetic construct
  source 1..20: mol_type = other RNA
aaaggatcagaatctagttt

SEQ ID NO: 4616 - RNA, 20 nt, synthetic construct
  source 1..20: mol_type = other RNA
ttttgattatttctctatga

SEQ ID NO: 4617 - RNA, 20 nt, synthetic construct
  source 1..20: mol_type = other RNA
gaatctagtttaaaagagtt

SEQ ID NO: 4618 - RNA, 20 nt, synthetic construct
  source 1..20: mol_type = other RNA
agtttaaaagagttaattca

SEQ ID NO: 4619 - RNA, 20 nt, synthetic construct
  source 1..20: mol_type = other RNA
tcagctttgcgcttgaatta

SEQ ID NO: 4620 - RNA, 20 nt, synthetic construct
  source 1..20: mol_type = other RNA
gggaaacacagactctaaat

SEQ ID NO: 4621 - RNA, 20 nt, synthetic construct
  source 1..20: mol_type = other RNA
ctgtggtaagaattaggatg

SEQ ID NO: 4622 - RNA, 20 nt, synthetic construct
  source 1..20: mol_type = other RNA
cctacacataaaaagttgta

SEQ ID NO: 4623 - RNA, 20 nt, synthetic construct
  source 1..20: mol_type = other RNA
taggagaggaatgaacttaa

SEQ ID NO: 4624 - RNA, 20 nt, synthetic construct
  source 1..20: mol_type = other RNA
tcttccagaagagcccagtt

SEQ ID NO: 4625 - RNA, 20 nt, synthetic construct
  source 1..20: mol_type = other RNA
gtgtaattgtcccttacttg

SEQ ID NO: 4626 - RNA, 20 nt, synthetic construct
  source 1..20: mol_type = other RNA
acaaatttaatgtatttttc

SEQ ID NO: 4627 - RNA, 20 nt, synthetic construct
  source 1..20: mol_type = other RNA
taactaagcacttaccatgc

SEQ ID NO: 4628 - RNA, 20 nt, synthetic construct
  source 1..20: mol_type = other RNA
tttgcaatttaaggtgtgac

SEQ ID NO: 4629 - RNA, 20 nt, synthetic construct
  source 1..20: mol_type = other RNA
agaactttcttcttctcact

SEQ ID NO: 4630 - RNA, 20 nt, synthetic construct
  source 1..20: mol_type = other RNA
tgcccactccaattcatcct

SEQ ID NO: 4631 - RNA, 20 nt, synthetic construct
  source 1..20: mol_type = other RNA
tccatgtggcaccgagtggt

SEQ ID NO: 4632 - RNA, 20 nt, synthetic construct
  source 1..20: mol_type = other RNA
ttacagagcacccacctacc

SEQ ID NO: 4633 - RNA, 20 nt, synthetic construct
  source 1..20: mol_type = other RNA
aggctgaggtagtctcagat

SEQ ID NO: 4634 - RNA, 20 nt, synthetic construct
  source 1..20: mol_type = other RNA
gagactacctcagcctggat

SEQ ID NO: 4635 - RNA, 20 nt, synthetic construct
  source 1..20: mol_type = other RNA
ccatctgagactacctcagc

SEQ ID NO: 4636 - RNA, 20 nt, synthetic construct
  source 1..20: mol_type = other RNA
ctaaggcaggggcaaaatgc

SEQ ID NO: 4637 - RNA, 20 nt, synthetic construct
  source 1..20: mol_type = other RNA
agctgcaaattttctgaact

SEQ ID NO: 4638 - RNA, 20 nt, synthetic construct
  source 1..20: mol_type = other RNA
cctttcactccatgtctcac

SEQ ID NO: 4639 - RNA, 20 nt, synthetic construct
  source 1..20: mol_type = other RNA
ttttggagctttaagatttg

SEQ ID NO: 4640 - RNA, 20 nt, synthetic construct
  source 1..20: mol_type = other RNA
taaagctccaaaatgatctc

SEQ ID NO: 4641 - RNA, 20 nt, synthetic construct
  source 1..20: mol_type = other RNA
agcagggcagtcaaatctta

SEQ ID NO: 4642 - RNA, 20 nt, synthetic construct
  source 1..20: mol_type = other RNA
gtttgaaattatatatttat

SEQ ID NO: 4643 - RNA, 20 nt, synthetic construct
  source 1..20: mol_type = other RNA
tataaatatataatttcaaa

SEQ ID NO: 4644 - RNA, 20 nt, synthetic construct
  source 1..20: mol_type = other RNA
tggccaggcacagtggcgca

SEQ ID NO: 4645 - RNA, 20 nt, synthetic construct
  source 1..20: mol_type = other RNA
caatactttgggaggttgag

SEQ ID NO: 4646 - RNA, 20 nt, synthetic construct
  source 1..20: mol_type = other RNA
acccacctcaacctcccaaa

SEQ ID NO: 4647 - RNA, 20 nt, synthetic construct
  source 1..20: mol_type = other RNA
cttgagcccaggagtttgag

SEQ ID NO: 4648 - RNA, 20 nt, synthetic construct
  source 1..20: mol_type = other RNA
gtacaaaaaaaaaaatgcaa

SEQ ID NO: 4649 - RNA, 20 nt, synthetic construct
  source 1..20: mol_type = other RNA
tcctattccactaataaaag

SEQ ID NO: 4650 - RNA, 20 nt, synthetic construct
  source 1..20: mol_type = other RNA
tagtaaacttatcttcctat

SEQ ID NO: 4651 - RNA, 20 nt, synthetic construct
  source 1..20: mol_type = other RNA
attcagacggatttcaccaa

SEQ ID NO: 4652 - RNA, 20 nt, synthetic construct
  source 1..20: mol_type = other RNA
gtctgaattgatttaatcct

SEQ ID NO: 4653 - RNA, 20 nt, synthetic construct
  source 1..20: mol_type = other RNA
caaaggccgggcgtggtagc

SEQ ID NO: 4654 - RNA, 20 nt, synthetic construct
  source 1..20: mol_type = other RNA
atcccaaaggccgggcgtgg

SEQ ID NO: 4655 - RNA, 20 nt, synthetic construct
  source 1..20: mol_type = other RNA
tagggtggttgggaggtctg

SEQ ID NO: 4656 - RNA, 20 nt, synthetic construct
  source 1..20: mol_type = other RNA
atttcctcttctaaattggg

SEQ ID NO: 4657 - RNA, 20 nt, synthetic construct
  source 1..20: mol_type = other RNA
ttctctattgcccaggctgg

SEQ ID NO: 4658 - RNA, 20 nt, synthetic construct
  source 1..20: mol_type = other RNA
ttgcctgctttcattttgcc

SEQ ID NO: 4659 - RNA, 20 nt, synthetic construct
  source 1..20: mol_type = other RNA
ctccctgccaagtactcctt

SEQ ID NO: 4660 - RNA, 20 nt, synthetic construct
  source 1..20: mol_type = other RNA
ccacataacctggagcagct

SEQ ID NO: 4661 - RNA, 20 nt, synthetic construct
  source 1..20: mol_type = other RNA
ctcccgcagcctgggaaaca

SEQ ID NO: 4662 - RNA, 20 nt, synthetic construct
  source 1..20: mol_type = other RNA
taccctgtttcccaggctgc

SEQ ID NO: 4663 - RNA, 20 nt, synthetic construct
  source 1..20: mol_type = other RNA
ttaaaaactctgacgccgaa

SEQ ID NO: 4664 - RNA, 20 nt, synthetic construct
  source 1..20: mol_type = other RNA
caccaaccagcactccccac

SEQ ID NO: 4665 - RNA, 20 nt, synthetic construct
  source 1..20: mol_type = other RNA
cacccagaaacagaaaacag

SEQ ID NO: 4666 - RNA, 20 nt, synthetic construct
  source 1..20: mol_type = other RNA
ggctcaaccagttctgccat

SEQ ID NO: 4667 - RNA, 20 nt, synthetic construct
  source 1..20: mol_type = other RNA
gctgacaccacccagactgg

SEQ ID NO: 4668 - RNA, 20 nt, synthetic construct
  source 1..20: mol_type = other RNA
atcgagtgcagggtctgcaa

SEQ ID NO: 4669 - RNA, 20 nt, synthetic construct
  source 1..20: mol_type = other RNA
agtgcagggtctgcaaaata

SEQ ID NO: 4670 - RNA, 20 nt, synthetic construct
  source 1..20: mol_type = other RNA
tgtgacttagaatgcctaac

SEQ ID NO: 4671 - RNA, 20 nt, synthetic construct
  source 1..20: mol_type = other RNA
catcctgtgacttagaatgc

SEQ ID NO: 4672 - RNA, 20 nt, synthetic construct
  source 1..20: mol_type = other RNA
tgtgccgacctcgtatctca

SEQ ID NO: 4673 - RNA, 20 nt, synthetic construct
  source 1..20: mol_type = other RNA
accctttgtttagcatttca

SEQ ID NO: 4674 - RNA, 20 nt, synthetic construct
  source 1..20: mol_type = other RNA
agaaataactataaaaatgg

SEQ ID NO: 4675 - RNA, 20 nt, synthetic construct
  source 1..20: mol_type = other RNA
tgttctgtcttggagagctg

SEQ ID NO: 4676 - RNA, 20 nt, synthetic construct
  source 1..20: mol_type = other RNA
tggccaggtatcctgttctg

SEQ ID NO: 4677 - RNA, 20 nt, synthetic construct
  source 1..20: mol_type = other RNA
gttaacaccttggcattagg

SEQ ID NO: 4678 - RNA, 20 nt, synthetic construct
  source 1..20: mol_type = other RNA
ctacttagagggcaaagtaa

SEQ ID NO: 4679 - RNA, 20 nt, synthetic construct
  source 1..20: mol_type = other RNA
tgctgccttattaatgtttg

SEQ ID NO: 4680 - RNA, 20 nt, synthetic construct
  source 1..20: mol_type = other RNA
ctgaagcactttacatatgt

SEQ ID NO: 4681 - RNA, 20 nt, synthetic construct
  source 1..20: mol_type = other RNA
tagtcaggtcttgaagagtg

SEQ ID NO: 4682 - RNA, 20 nt, synthetic construct
  source 1..20: mol_type = other RNA
agagaactcttattcactct

SEQ ID NO: 4683 - RNA, 20 nt, synthetic construct
  source 1..20: mol_type = other RNA
acagatgcttttggatttgc

SEQ ID NO: 4684 - RNA, 20 nt, synthetic construct
  source 1..20: mol_type = other RNA
gtagatgaagttagcaagtt

SEQ ID NO: 4685 - RNA, 20 nt, synthetic construct
  source 1..20: mol_type = other RNA
aaaagcatctgtagatgaag

SEQ ID NO: 4686 - RNA, 20 nt, synthetic construct
  source 1..20: mol_type = other RNA
tgtgcaaataatcacagtcc

SEQ ID NO: 4687 - RNA, 20 nt, synthetic construct
  source 1..20: mol_type = other RNA
cagtcctatttcttcctgtt

SEQ ID NO: 4688 - RNA, 20 nt, synthetic construct
  source 1..20: mol_type = other RNA
atgccagtggacatccttgt

SEQ ID NO: 4689 - RNA, 20 nt, synthetic construct
  source 1..20: mol_type = other RNA
ttgtctctttcctcatctca

SEQ ID NO: 4690 - RNA, 20 nt, synthetic construct
  source 1..20: mol_type = other RNA
cagtgggaaaactttcaata

SEQ ID NO: 4691 - RNA, 20 nt, synthetic construct
  source 1..20: mol_type = other RNA
ccgacttttagcatccttat

SEQ ID NO: 4692 - RNA, 20 nt, synthetic construct
  source 1..20: mol_type = other RNA
aatagcttggaaccttagcc

SEQ ID NO: 4693 - RNA, 20 nt, synthetic construct
  source 1..20: mol_type = other RNA
ttgtttgtgtgtgtatctac

SEQ ID NO: 4694 - RNA, 20 nt, synthetic construct
  source 1..20: mol_type = other RNA
acatgtctttgtattgctgt

SEQ ID NO: 4695 - RNA, 20 nt, synthetic construct
  source 1..20: mol_type = other RNA
ttgaagaagaactttcccat

SEQ ID NO: 4696 - RNA, 20 nt, synthetic construct
  source 1..20: mol_type = other RNA
ccaaataaggaatggcatgc

SEQ ID NO: 4697 - RNA, 20 nt, synthetic construct
  source 1..20: mol_type = other RNA
ctagataacttccttttctt

SEQ ID NO: 4698 - RNA, 20 nt, synthetic construct
  source 1..20: mol_type = other RNA
agggatagttaaggaagaat

SEQ ID NO: 4699 - RNA, 20 nt, synthetic construct
  source 1..20: mol_type = other RNA
ggtaaagtgtaaagtgtgag

SEQ ID NO: 4700 - RNA, 20 nt, synthetic construct
  source 1..20: mol_type = other RNA
tgggacccccaaaattacta

SEQ ID NO: 4701 - RNA, 20 nt, synthetic construct
  source 1..20: mol_type = other RNA
tcccttcagcctagtaattt

SEQ ID NO: 4702 - RNA, 20 nt, synthetic construct
  source 1..20: mol_type = other RNA
tagtgagactttgaatagaa

SEQ ID NO: 4703 - RNA, 20 nt, synthetic construct
  source 1..20: mol_type = other RNA
aactgcctcctttggaaagg

SEQ ID NO: 4704 - RNA, 20 nt, synthetic construct
  source 1..20: mol_type = other RNA
cattcagtactcaattcttt

SEQ ID NO: 4705 - RNA, 20 nt, synthetic construct
  source 1..20: mol_type = other RNA
ataaatgcccatatctaata

SEQ ID NO: 4706 - RNA, 20 nt, synthetic construct
  source 1..20: mol_type = other RNA
aatagttcaggatttcttgc

SEQ ID NO: 4707 - RNA, 20 nt, synthetic construct
  source 1..20: mol_type = other RNA
tgaactattagatatgggca

SEQ ID NO: 4708 - RNA, 20 nt, synthetic construct
  source 1..20: mol_type = other RNA
tagttaacacataattctgt

SEQ ID NO: 4709 - RNA, 20 nt, synthetic construct
  source 1..20: mol_type = other RNA
aaaagttagttcaaattaca

SEQ ID NO: 4710 - RNA, 20 nt, synthetic construct
  source 1..20: mol_type = other RNA
gtaatttgaactaacttttg

SEQ ID NO: 4711 - RNA, 20 nt, synthetic construct
  source 1..20: mol_type = other RNA
aaactttttccacatttttc

SEQ ID NO: 4712 - RNA, 20 nt, synthetic construct
  source 1..20: mol_type = other RNA
ggttttaaagaatattttat

SEQ ID NO: 4713 - RNA, 20 nt, synthetic construct
  source 1..20: mol_type = other RNA
agactaagagctttaactac

SEQ ID NO: 4714 - RNA, 20 nt, synthetic construct
  source 1..20: mol_type = other RNA
tttctacttaatttactgtg

SEQ ID NO: 4715 - RNA, 20 nt, synthetic construct
  source 1..20: mol_type = other RNA
agttttcatttgtttgctgt

SEQ ID NO: 4716 - RNA, 20 nt, synthetic construct
  source 1..20: mol_type = other RNA
agcagagaataaacagcaaa

SEQ ID NO: 4717 - RNA, 20 nt, synthetic construct
  source 1..20: mol_type = other RNA
tggccaggctggttttgaac

SEQ ID NO: 4718 - RNA, 20 nt, synthetic construct
  source 1..20: mol_type = other RNA
tcttggccaggctggttttg

SEQ ID NO: 4719 - RNA, 20 nt, synthetic construct
  source 1..20: mol_type = other RNA
cagctacttgggaggctgag

SEQ ID NO: 4720 - RNA, 20 nt, synthetic construct
  source 1..20: mol_type = other RNA
aaaaagttagtttaaggtta

SEQ ID NO: 4721 - RNA, 20 nt, synthetic construct
  source 1..20: mol_type = other RNA
agaaccctaaaatctaaaaa

SEQ ID NO: 4722 - RNA, 20 nt, synthetic construct
  source 1..20: mol_type = other RNA
ttatttcccaagaattactc

SEQ ID NO: 4723 - RNA, 20 nt, synthetic construct
  source 1..20: mol_type = other RNA
tctttatttcccaagaatta

SEQ ID NO: 4724 - RNA, 20 nt, synthetic construct
  source 1..20: mol_type = other RNA
ttaaaatcatctttatttcc

SEQ ID NO: 4725 - RNA, 20 nt, synthetic construct
  source 1..20: mol_type = other RNA
accagaaaatatgcattgat

SEQ ID NO: 4726 - RNA, 20 nt, synthetic construct
  source 1..20: mol_type = other RNA
gccctcttgcatgggaaagc

SEQ ID NO: 4727 - RNA, 20 nt, synthetic construct
  source 1..20: mol_type = other RNA
gctgttataacatcagccct

SEQ ID NO: 4728 - RNA, 20 nt, synthetic construct
  source 1..20: mol_type = other RNA
ttatgctacagtgtgttttc

SEQ ID NO: 4729 - RNA, 20 nt, synthetic construct
  source 1..20: mol_type = other RNA
actacaactgaatttctata

SEQ ID NO: 4730 - RNA, 20 nt, synthetic construct
  source 1..20: mol_type = other RNA
aaggttgacttaaagaagca

SEQ ID NO: 4731 - RNA, 20 nt, synthetic construct
  source 1..20: mol_type = other RNA
atttggttttaggaggtttg

SEQ ID NO: 4732 - RNA, 20 nt, synthetic construct
  source 1..20: mol_type = other RNA
tcccaatagtaataataata

SEQ ID NO: 4733 - RNA, 20 nt, synthetic construct
  source 1..20: mol_type = other RNA
gtgtttccttaaagtcttag

SEQ ID NO: 4734 - RNA, 20 nt, synthetic construct
  source 1..20: mol_type = other RNA
ctatagcaaacattcttgac

SEQ ID NO: 4735 - RNA, 20 nt, synthetic construct
  source 1..20: mol_type = other RNA
accccctgaagttcccatta

SEQ ID NO: 4736 - RNA, 20 nt, synthetic construct
  source 1..20: mol_type = other RNA
tttagccaaattcatttctt

SEQ ID NO: 4737 - RNA, 20 nt, synthetic construct
  source 1..20: mol_type = other RNA
tcttttttctgtaactgctt

SEQ ID NO: 4738 - RNA, 20 nt, synthetic construct
  source 1..20: mol_type = other RNA
tcatgggaggcagagggacc

SEQ ID NO: 4739 - RNA, 20 nt, synthetic construct
  source 1..20: mol_type = other RNA
ccataaatcttcatgggagg

SEQ ID NO: 4740 - RNA, 20 nt, synthetic construct
  source 1..20: mol_type = other RNA
catctcttacagaggaaatg

SEQ ID NO: 4741 - RNA, 20 nt, synthetic construct
  source 1..20: mol_type = other RNA
cttacagaggaaatgaggca

SEQ ID NO: 4742 - RNA, 20 nt, synthetic construct
  source 1..20: mol_type = other RNA
gccttatattccctgcctcc

SEQ ID NO: 4743 - RNA, 20 nt, synthetic construct
  source 1..20: mol_type = other RNA
tgaacaaagaattggacaaa

SEQ ID NO: 4744 - RNA, 20 nt, synthetic construct
  source 1..20: mol_type = other RNA
aaaccccttaatgaatccct

SEQ ID NO: 4745 - RNA, 20 nt, synthetic construct
  source 1..20: mol_type = other RNA
acagctgtcccttttattga

SEQ ID NO: 4746 - RNA, 20 nt, synthetic construct
  source 1..20: mol_type = other RNA
atctacagctgtccctttta

SEQ ID NO: 4747 - RNA, 20 nt, synthetic construct
  source 1..20: mol_type = other RNA
tgtcagcgtgaggatgaaag

SEQ ID NO: 4748 - RNA, 20 nt, synthetic construct
  source 1..20: mol_type = other RNA
tcacgctgacacgatggctg

SEQ ID NO: 4749 - RNA, 20 nt, synthetic construct
  source 1..20: mol_type = other RNA
aatcttgtagattgaccact

SEQ ID NO: 4750 - RNA, 20 nt, synthetic construct
  source 1..20: mol_type = other RNA
cctcttgaagctgaaatttc

SEQ ID NO: 4751 - RNA, 20 nt, synthetic construct
  source 1..20: mol_type = other RNA
cctgctcacaccaccagccc

SEQ ID NO: 4752 - RNA, 20 nt, synthetic construct
  source 1..20: mol_type = other RNA
tcagagcccaatcagggggt

SEQ ID NO: 4753 - RNA, 20 nt, synthetic construct
  source 1..20: mol_type = other RNA
gggggtcagtggagaatggg

SEQ ID NO: 4754 - RNA, 20 nt, synthetic construct
  source 1..20: mol_type = other RNA
cccattctccactgaccccc

SEQ ID NO: 4755 - RNA, 20 nt, synthetic construct
  source 1..20: mol_type = other RNA
ctgagagcacggctgagaat

SEQ ID NO: 4756 - RNA, 20 nt, synthetic construct
  source 1..20: mol_type = other RNA
ctttcctgaggaggtgttcc

SEQ ID NO: 4757 - RNA, 20 nt, synthetic construct
  source 1..20: mol_type = other RNA
ttcccactgctgccaagcca

SEQ ID NO: 4758 - RNA, 20 nt, synthetic construct
  source 1..20: mol_type = other RNA
gaattctcacctgaagtttt

SEQ ID NO: 4759 - RNA, 20 nt, synthetic construct
  source 1..20: mol_type = other RNA
cttgaaccgggggcggggag

SEQ ID NO: 4760 - RNA, 20 nt, synthetic construct
  source 1..20: mol_type = other RNA
cagctactcaggaggctgag

SEQ ID NO: 4761 - RNA, 20 nt, synthetic construct
  source 1..20: mol_type = other RNA
atttaacaaacaactaaggg

SEQ ID NO: 4762 - RNA, 20 nt, synthetic construct
  source 1..20: mol_type = other RNA
ttaaacatctatttaacaaa

SEQ ID NO: 4763 - RNA, 20 nt, synthetic construct
  source 1..20: mol_type = other RNA
ggaagcttctacagtgattg

SEQ ID NO: 4764 - RNA, 20 nt, synthetic construct
  source 1..20: mol_type = other RNA
ctgtagaagcttccagattg

SEQ ID NO: 4765 - RNA, 20 nt, synthetic construct
  source 1..20: mol_type = other RNA
gcattcaggcctgtcaccat

SEQ ID NO: 4766 - RNA, 20 nt, synthetic construct
  source 1..20: mol_type = other RNA
gactttttacagatcgggaa

SEQ ID NO: 4767 - RNA, 20 nt, synthetic construct
  source 1..20: mol_type = other RNA
gtaaaaagtcggatgtcctt

SEQ ID NO: 4768 - RNA, 20 nt, synthetic construct
  source 1..20: mol_type = other RNA
ggaaactgagactgggaggg

SEQ ID NO: 4769 - RNA, 20 nt, synthetic construct
  source 1..20: mol_type = other RNA
ctgaggtcactcttggagtc

SEQ ID NO: 4770 - RNA, 20 nt, synthetic construct
  source 1..20: mol_type = other RNA
acagaccctcccagctctta

SEQ ID NO: 4771 - RNA, 20 nt, synthetic construct
  source 1..20: mol_type = other RNA
atttcttacccacagactgt

SEQ ID NO: 4772 - RNA, 20 nt, synthetic construct
  source 1..20: mol_type = other RNA
tcttggcaccaagtctgatg

SEQ ID NO: 4773 - RNA, 20 nt, synthetic construct
  source 1..20: mol_type = other RNA
tggcaccaagtctgatgcaa

SEQ ID NO: 4774 - RNA, 20 nt, synthetic construct
  source 1..20: mol_type = other RNA
gacttggtgccaagatgatt

SEQ ID NO: 4775 - RNA, 20 nt, synthetic construct
  source 1..20: mol_type = other RNA
cagaacagagtgtgtttaaa

SEQ ID NO: 4776 - RNA, 20 nt, synthetic construct
  source 1..20: mol_type = other RNA
tggttatttgaatttctctg

SEQ ID NO: 4777 - RNA, 20 nt, synthetic construct
  source 1..20: mol_type = other RNA
ttaggtggaaataaaaattc

SEQ ID NO: 4778 - RNA, 20 nt, synthetic construct
  source 1..20: mol_type = other RNA
acagaattcctcttgccatg

SEQ ID NO: 4779 - RNA, 20 nt, synthetic construct
  source 1..20: mol_type = other RNA
taatttcatctacagaattc

SEQ ID NO: 4780 - RNA, 20 nt, synthetic construct
  source 1..20: mol_type = other RNA
gcagaccttaaggtaggaga

SEQ ID NO: 4781 - RNA, 20 nt, synthetic construct
  source 1..20: mol_type = other RNA
cctaccttaaggtctgctga

SEQ ID NO: 4782 - RNA, 20 nt, synthetic construct
  source 1..20: mol_type = other RNA
tgggagccctttaaaagcag

SEQ ID NO: 4783 - RNA, 20 nt, synthetic construct
  source 1..20: mol_type = other RNA
tggccaagcaaccatacctc

SEQ ID NO: 4784 - RNA, 20 nt, synthetic construct
  source 1..20: mol_type = other RNA
tagcacaaaagtagtatgta

SEQ ID NO: 4785 - RNA, 20 nt, synthetic construct
  source 1..20: mol_type = other RNA
gaagtacaacagggacctag

SEQ ID NO: 4786 - RNA, 20 nt, synthetic construct
  source 1..20: mol_type = other RNA
agtcccagatgtcaagcacc

SEQ ID NO: 4787 - RNA, 20 nt, synthetic construct
  source 1..20: mol_type = other RNA
caaacagcttctagtagcaa

SEQ ID NO: 4788 - RNA, 20 nt, synthetic construct
  source 1..20: mol_type = other RNA
gcttctgcctcaagcgggta

SEQ ID NO: 4789 - RNA, 20 nt, synthetic construct
  source 1..20: mol_type = other RNA
cccctagtttatggggacct

SEQ ID NO: 4790 - RNA, 20 nt, synthetic construct
  source 1..20: mol_type = other RNA
ctgggccaggctggaagctc

SEQ ID NO: 4791 - RNA, 20 nt, synthetic construct
  source 1..20: mol_type = other RNA
ggaggcgggcagcaggcgct

SEQ ID NO: 4792 - RNA, 20 nt, synthetic construct
  source 1..20: mol_type = other RNA
tagctgcttaggaagctgag

SEQ ID NO: 4793 - RNA, 20 nt, synthetic construct
  source 1..20: mol_type = other RNA
cttgaactcaggaggcagag

SEQ ID NO: 4794 - RNA, 20 nt, synthetic construct
  source 1..20: mol_type = other RNA
cggctcattgcaccctctgc

SEQ ID NO: 4795 - RNA, 20 nt, synthetic construct
  source 1..20: mol_type = other RNA
caggactgccctccagcctg

SEQ ID NO: 4796 - RNA, 20 nt, synthetic construct
  source 1..20: mol_type = other RNA
agtggacattgaccttctcc

SEQ ID NO: 4797 - RNA, 20 nt, synthetic construct
  source 1..20: mol_type = other RNA
tgggggacggttggggtgga

SEQ ID NO: 4798 - RNA, 20 nt, synthetic construct
  source 1..20: mol_type = other RNA
cccacagcaggcagggcaca

SEQ ID NO: 4799 - RNA, 20 nt, synthetic construct
  source 1..20: mol_type = other RNA
acatggaaggagcgagaccc

SEQ ID NO: 4800 - RNA, 20 nt, synthetic construct
  source 1..20: mol_type = other RNA
ccaaagtcaaagagctagga

SEQ ID NO: 4801 - RNA, 20 nt, synthetic construct
  source 1..20: mol_type = other RNA
gtccagggggcaagtgcctc

SEQ ID NO: 4802 - RNA, 20 nt, synthetic construct
  source 1..20: mol_type = other RNA
aaagtttcacctactgcatc

SEQ ID NO: 4803 - RNA, 20 nt, synthetic construct
  source 1..20: mol_type = other RNA
tgaacatttgccatgccctt

SEQ ID NO: 4804 - RNA, 20 nt, synthetic construct
  source 1..20: mol_type = other RNA
aaatgacatactgctgtgcg

SEQ ID NO: 4805 - RNA, 20 nt, synthetic construct
  source 1..20: mol_type = other RNA
cttccaagtggggcttgccc

SEQ ID NO: 4806 - RNA, 20 nt, synthetic construct
  source 1..20: mol_type = other RNA
caaatcccttccaagtgggg

SEQ ID NO: 4807 - RNA, 20 nt, synthetic construct
  source 1..20: mol_type = other RNA
ctgaagcctctctttaaggt

SEQ ID NO: 4808 - RNA, 20 nt, synthetic construct
  source 1..20: mol_type = other RNA
gtgtgatccggggccaggac

SEQ ID NO: 4809 - RNA, 20 nt, synthetic construct
  source 1..20: mol_type = other RNA
ggacacagagaaggagggag

SEQ ID NO: 4810 - RNA, 20 nt, synthetic construct
  source 1..20: mol_type = other RNA
ccttcgctccaccaagcgaa

SEQ ID NO: 4811 - RNA, 20 nt, synthetic construct
  source 1..20: mol_type = other RNA
ggtgcctgagggccccagcc

SEQ ID NO: 4812 - RNA, 20 nt, synthetic construct
  source 1..20: mol_type = other RNA
cagggccacctcgatgggac

SEQ ID NO: 4813 - RNA, 20 nt, synthetic construct
  source 1..20: mol_type = other RNA
aggtggccctgggatgctgg

SEQ ID NO: 4814 - RNA, 20 nt, synthetic construct
  source 1..20: mol_type = other RNA
cctctccagagacctgtact

SEQ ID NO: 4815 - RNA, 20 nt, synthetic construct
  source 1..20: mol_type = other RNA
ccctaagctttaacttcctc

SEQ ID NO: 4816 - RNA, 20 nt, synthetic construct
  source 1..20: mol_type = other RNA
ctgccctcaggaagctccta

SEQ ID NO: 4817 - RNA, 20 nt, synthetic construct
  source 1..20: mol_type = other RNA
tgagtgtaagtccccttagt

SEQ ID NO: 4818 - RNA, 20 nt, synthetic construct
  source 1..20: mol_type = other RNA
gccctctaagcaaacttcct

SEQ ID NO: 4819 - RNA, 20 nt, synthetic construct
  source 1..20: mol_type = other RNA
cagcaggtgacagctggcag

SEQ ID NO: 4820 - RNA, 20 nt, synthetic construct
  source 1..20: mol_type = other RNA
tcattttacggatgaggaga

SEQ ID NO: 4821 - RNA, 20 nt, synthetic construct
  source 1..20: mol_type = other RNA
gtaaaatgaggataatattt

SEQ ID NO: 4822 - RNA, 20 nt, synthetic construct
  source 1..20: mol_type = other RNA
gcaaggatgctgggagctca

SEQ ID NO: 4823 - RNA, 20 nt, synthetic construct
  source 1..20: mol_type = other RNA
ttgcagatgagggcaggaca

SEQ ID NO: 4824 - RNA, 20 nt, synthetic construct
  source 1..20: mol_type = other RNA
cagcttcctcggctgtcttc

SEQ ID NO: 4825 - RNA, 20 nt, synthetic construct
  source 1..20: mol_type = other RNA
aggatcccatcaatctgctc

SEQ ID NO: 4826 - RNA, 20 nt, synthetic construct
  source 1..20: mol_type = other RNA
tggatttgaaccccagcctg

SEQ ID NO: 4827 - RNA, 20 nt, synthetic construct
  source 1..20: mol_type = other RNA
catcaatctgctccgtcacc

SEQ ID NO: 4828 - RNA, 20 nt, synthetic construct
  source 1..20: mol_type = other RNA
atctgctccgtcaccctggt

SEQ ID NO: 4829 - RNA, 20 nt, synthetic construct
  source 1..20: mol_type = other RNA
gctccgtcaccctggtctgt

SEQ ID NO: 4830 - RNA, 20 nt, synthetic construct
  source 1..20: mol_type = other RNA
cagaccagggtgacggagca

SEQ ID NO: 4831 - RNA, 20 nt, synthetic construct
  source 1..20: mol_type = other RNA
accacttctatctctggaca

SEQ ID NO: 4832 - RNA, 20 nt, synthetic construct
  source 1..20: mol_type = other RNA
ggtaagttgtaagctctcca

SEQ ID NO: 4833 - RNA, 20 nt, synthetic construct
  source 1..20: mol_type = other RNA
ctggaggtatgcaagtagag

SEQ ID NO: 4834 - RNA, 20 nt, synthetic construct
  source 1..20: mol_type = other RNA
ctacttgcatacctccaggg

SEQ ID NO: 4835 - RNA, 20 nt, synthetic construct
  source 1..20: mol_type = other RNA
cttggcagacatcatatcaa

SEQ ID NO: 4836 - RNA, 20 nt, synthetic construct
  source 1..20: mol_type = other RNA
tatcaaaatctaaagcatcc

SEQ ID NO: 4837 - RNA, 20 nt, synthetic construct
  source 1..20: mol_type = other RNA
ccacttacgaggaagccgtg

SEQ ID NO: 4838 - RNA, 20 nt, synthetic construct
  source 1..20: mol_type = other RNA
acttggctccagggcttcct

SEQ ID NO: 4839 - RNA, 20 nt, synthetic construct
  source 1..20: mol_type = other RNA
agggatgccctgctcagcac

SEQ ID NO: 4840 - RNA, 20 nt, synthetic construct
  source 1..20: mol_type = other RNA
ctcgatccacttggctccag

SEQ ID NO: 4841 - RNA, 20 nt, synthetic construct
  source 1..20: mol_type = other RNA
gccttgctcttgatgccgtt

SEQ ID NO: 4842 - RNA, 20 nt, synthetic construct
  source 1..20: mol_type = other RNA
agagcaaggctgatgctctc

SEQ ID NO: 4843 - RNA, 20 nt, synthetic construct
  source 1..20: mol_type = other RNA
tatctaaaaaaaaaaaaaag

SEQ ID NO: 4844 - RNA, 20 nt, synthetic construct
  source 1..20: mol_type = other RNA
cactgtgtcacccaggctgg

SEQ ID NO: 4845 - RNA, 20 nt, synthetic construct
  source 1..20: mol_type = other RNA
tgactcgctgcagcctcttc

SEQ ID NO: 4846 - RNA, 20 nt, synthetic construct
  source 1..20: mol_type = other RNA
cttgagcctgggaggaagag

SEQ ID NO: 4847 - RNA, 20 nt, synthetic construct
  source 1..20: mol_type = other RNA
tcccacctcagcctcccaag

SEQ ID NO: 4848 - RNA, 20 nt, synthetic construct
  source 1..20: mol_type = other RNA
tagtgacttggacaagtgat

SEQ ID NO: 4849 - RNA, 20 nt, synthetic construct
  source 1..20: mol_type = other RNA
cttgtccaagtcactaagat

SEQ ID NO: 4850 - RNA, 20 nt, synthetic construct
  source 1..20: mol_type = other RNA
gtaaaatgggaattgaggat

SEQ ID NO: 4851 - RNA, 20 nt, synthetic construct
  source 1..20: mol_type = other RNA
tcaattcccattttacagat

SEQ ID NO: 4852 - RNA, 20 nt, synthetic construct
  source 1..20: mol_type = other RNA
gctctttgagggaatcctca

SEQ ID NO: 4853 - RNA, 20 nt, synthetic construct
  source 1..20: mol_type = other RNA
tcacaaatcagctctttgag

SEQ ID NO: 4854 - RNA, 20 nt, synthetic construct
  source 1..20: mol_type = other RNA
cacctggcctgggctttcat

SEQ ID NO: 4855 - RNA, 20 nt, synthetic construct
  source 1..20: mol_type = other RNA
tgaaagaggctgagtcaggg

SEQ ID NO: 4856 - RNA, 20 nt, synthetic construct
  source 1..20: mol_type = other RNA
cagggcctccgcacctgctg

SEQ ID NO: 4857 - RNA, 20 nt, synthetic construct
  source 1..20: mol_type = other RNA
ttccggttagcaagccccgt

SEQ ID NO: 4858 - RNA, 20 nt, synthetic construct
  source 1..20: mol_type = other RNA
tcctccccaggcctgcccct

SEQ ID NO: 4859 - RNA, 20 nt, synthetic construct
  source 1..20: mol_type = other RNA
aggtccacgcaggcaaggcg

SEQ ID NO: 4860 - RNA, 20 nt, synthetic construct
  source 1..20: mol_type = other RNA
ttgcgagcgggctcccatga

SEQ ID NO: 4861 - RNA, 20 nt, synthetic construct
  source 1..20: mol_type = other RNA
cgaaagctggggttagcgcg

SEQ ID NO: 4862 - RNA, 20 nt, synthetic construct
  source 1..20: mol_type = other RNA
tccagcagagggcgcgctaa

SEQ ID NO: 4863 - RNA, 20 nt, synthetic construct
  source 1..20: mol_type = other RNA
cccgcatttcacaggcgagg

SEQ ID NO: 4864 - RNA, 20 nt, synthetic construct
  source 1..20: mol_type = other RNA
ccttcacattcacacgctat

SEQ ID NO: 4865 - RNA, 20 nt, synthetic construct
  source 1..20: mol_type = other RNA
gggaggtacattattattcc

SEQ ID NO: 4866 - RNA, 20 nt, synthetic construct
  source 1..20: mol_type = other RNA
ggttacctcagtttcctcct

SEQ ID NO: 4867 - RNA, 20 nt, synthetic construct
  source 1..20: mol_type = other RNA
tgaccacactgccccacagt

SEQ ID NO: 4868 - RNA, 20 nt, synthetic construct
  source 1..20: mol_type = other RNA
cctcatttgcctactgtggg

SEQ ID NO: 4869 - RNA, 20 nt, synthetic construct
  source 1..20: mol_type = other RNA
gagcgagggagcacacaggg

SEQ ID NO: 4870 - RNA, 20 nt, synthetic construct
  source 1..20: mol_type = other RNA
ggaaggtcttctcgtcagcc

SEQ ID NO: 4871 - RNA, 20 nt, synthetic construct
  source 1..20: mol_type = other RNA
gcttcattgtgctggggctt

SEQ ID NO: 4872 - RNA, 20 nt, synthetic construct
  source 1..20: mol_type = other RNA
tggctcatgaggaacgtacc

SEQ ID NO: 4873 - RNA, 20 nt, synthetic construct
  source 1..20: mol_type = other RNA
gccccaggtctacggcacct

SEQ ID NO: 4874 - RNA, 20 nt, synthetic construct
  source 1..20: mol_type = other RNA
ccatgacgctgcccatggca

SEQ ID NO: 4875 - RNA, 20 nt, synthetic construct
  source 1..20: mol_type = other RNA
ggggcatcatctggagcatg

SEQ ID NO: 4876 - RNA, 20 nt, synthetic construct
  source 1..20: mol_type = other RNA
tctggagcatgtgccagtgc

SEQ ID NO: 4877 - RNA, 20 nt, synthetic construct
  source 1..20: mol_type = other RNA
ggagcatgtgccagtgctac

SEQ ID NO: 4878 - RNA, 20 nt, synthetic construct
  source 1..20: mol_type = other RNA
ctaaattacacataaggctg

SEQ ID NO: 4879 - RNA, 20 nt, synthetic construct
  source 1..20: mol_type = other RNA
tcaatgcctagagaggctgg

SEQ ID NO: 4880 - RNA, 20 nt, synthetic construct
  source 1..20: mol_type = other RNA
acagttactcattaataccc

SEQ ID NO: 4881 - RNA, 20 nt, synthetic construct
  source 1..20: mol_type = other RNA
atcaacagttactcattaat

SEQ ID NO: 4882 - RNA, 20 nt, synthetic construct
  source 1..20: mol_type = other RNA
gggcctggaggttgccacaa

SEQ ID NO: 4883 - RNA, 20 nt, synthetic construct
  source 1..20: mol_type = other RNA
ctgctccttcatgtcccact

SEQ ID NO: 4884 - RNA, 20 nt, synthetic construct
  source 1..20: mol_type = other RNA
cacctacaaagcccagctca

SEQ ID NO: 4885 - RNA, 20 nt, synthetic construct
  source 1..20: mol_type = other RNA
tctctgcttggtgaactctt

SEQ ID NO: 4886 - RNA, 20 nt, synthetic construct
  source 1..20: mol_type = other RNA
ggaataatgcagaattcaaa

SEQ ID NO: 4887 - RNA, 20 nt, synthetic construct
  source 1..20: mol_type = other RNA
ctgaacctcgaggacattat

SEQ ID NO: 4888 - RNA, 20 nt, synthetic construct
  source 1..20: mol_type = other RNA
ttaaggctgaatagtatttc

SEQ ID NO: 4889 - RNA, 20 nt, synthetic construct
  source 1..20: mol_type = other RNA
tatggatagactatattttg

SEQ ID NO: 4890 - RNA, 20 nt, synthetic construct
  source 1..20: mol_type = other RNA
atatgatgaaatactattca

SEQ ID NO: 4891 - RNA, 20 nt, synthetic construct
  source 1..20: mol_type = other RNA
gcaagcaaaggagagacagc

SEQ ID NO: 4892 - RNA, 20 nt, synthetic construct
  source 1..20: mol_type = other RNA
ccttcgtccctgctgactct

SEQ ID NO: 4893 - RNA, 20 nt, synthetic construct
  source 1..20: mol_type = other RNA
tctccccaaaggccatgggc

SEQ ID NO: 4894 - RNA, 20 nt, synthetic construct
  source 1..20: mol_type = other RNA
cggcagcaagcccattctcc

SEQ ID NO: 4895 - RNA, 20 nt, synthetic construct
  source 1..20: mol_type = other RNA
gtacaatgggaataataatg

SEQ ID NO: 4896 - RNA, 20 nt, synthetic construct
  source 1..20: mol_type = other RNA
tgtattcaccgaaacactgt

SEQ ID NO: 4897 - RNA, 20 nt, synthetic construct
  source 1..20: mol_type = other RNA
ccatgaaacaaatcatacaa

SEQ ID NO: 4898 - RNA, 20 nt, synthetic construct
  source 1..20: mol_type = other RNA
tacaatgaaataaatgtact

SEQ ID NO: 4899 - RNA, 20 nt, synthetic construct
  source 1..20: mol_type = other RNA
tcctagctgtataaagagcc

SEQ ID NO: 4900 - RNA, 20 nt, synthetic construct
  source 1..20: mol_type = other RNA
agatgaaagtcatgagctac

SEQ ID NO: 4901 - RNA, 20 nt, synthetic construct
  source 1..20: mol_type = other RNA
ggatgtggctgaagtcaggc

SEQ ID NO: 4902 - RNA, 20 nt, synthetic construct
  source 1..20: mol_type = other RNA
caggggccagcaaggagcgg

SEQ ID NO: 4903 - RNA, 20 nt, synthetic construct
  source 1..20: mol_type = other RNA
ctggttcccagcttcggctg

SEQ ID NO: 4904 - RNA, 20 nt, synthetic construct
  source 1..20: mol_type = other RNA
aggcctgaacgtcgccaggg

SEQ ID NO: 4905 - RNA, 20 nt, synthetic construct
  source 1..20: mol_type = other RNA
acaagggctcagacgagagt

SEQ ID NO: 4906 - RNA, 20 nt, synthetic construct
  source 1..20: mol_type = other RNA
cagggtgtcccacaccctcc

SEQ ID NO: 4907 - RNA, 20 nt, synthetic construct
  source 1..20: mol_type = other RNA
gccacatctcagggtgtccc

SEQ ID NO: 4908 - RNA, 20 nt, synthetic construct
  source 1..20: mol_type = other RNA
ctgtgtggggaaactgaggc

SEQ ID NO: 4909 - RNA, 20 nt, synthetic construct
  source 1..20: mol_type = other RNA
tccctgtgtggggaaactga

SEQ ID NO: 4910 - RNA, 20 nt, synthetic construct
  source 1..20: mol_type = other RNA
ttcctactacccaggaatgt

SEQ ID NO: 4911 - RNA, 20 nt, synthetic construct
  source 1..20: mol_type = other RNA
agggcctactgtatgccagg

SEQ ID NO: 4912 - RNA, 20 nt, synthetic construct
  source 1..20: mol_type = other RNA
ctgtctgtttgtgaactgag

SEQ ID NO: 4913 - RNA, 20 nt, synthetic construct
  source 1..20: mol_type = other RNA
atgtacttattcattccatc

SEQ ID NO: 4914 - RNA, 20 nt, synthetic construct
  source 1..20: mol_type = other RNA
acattactgagcaccaactt

SEQ ID NO: 4915 - RNA, 20 nt, synthetic construct
  source 1..20: mol_type = other RNA
acccctgaggagctctgagt

SEQ ID NO: 4916 - RNA, 20 nt, synthetic construct
  source 1..20: mol_type = other RNA
acttctccaattattcaggg

SEQ ID NO: 4917 - RNA, 20 nt, synthetic construct
  source 1..20: mol_type = other RNA
gaaccaggtcactcatctac

SEQ ID NO: 4918 - RNA, 20 nt, synthetic construct
  source 1..20: mol_type = other RNA
gctgtaaacctaagaaagaa

SEQ ID NO: 4919 - RNA, 20 nt, synthetic construct
  source 1..20: mol_type = other RNA
accttcccgggcctcagttt

SEQ ID NO: 4920 - RNA, 20 nt, synthetic construct
  source 1..20: mol_type = other RNA
taccctaggtcttgcagcta

SEQ ID NO: 4921 - RNA, 20 nt, synthetic construct
  source 1..20: mol_type = other RNA
ctgagtcagaatgcctgggt

SEQ ID NO: 4922 - RNA, 20 nt, synthetic construct
  source 1..20: mol_type = other RNA
tggaaggaagccaagggggc

SEQ ID NO: 4923 - RNA, 20 nt, synthetic construct
  source 1..20: mol_type = other RNA
ccacatgacagggaggaagc

SEQ ID NO: 4924 - RNA, 20 nt, synthetic construct
  source 1..20: mol_type = other RNA
gggcaaagtcttggaagcgg

SEQ ID NO: 4925 - RNA, 20 nt, synthetic construct
  source 1..20: mol_type = other RNA
atcagggcaaagtcttggaa

SEQ ID NO: 4926 - RNA, 20 nt, synthetic construct
  source 1..20: mol_type = other RNA
tccaacgttggggcatcaat

SEQ ID NO: 4927 - RNA, 20 nt, synthetic construct
  source 1..20: mol_type = other RNA
ggcagcccatagtacaggtc

SEQ ID NO: 4928 - RNA, 20 nt, synthetic construct
  source 1..20: mol_type = other RNA
cagccttgggtgtcaggctc

SEQ ID NO: 4929 - RNA, 20 nt, synthetic construct
  source 1..20: mol_type = other RNA
tattttgccttcaaaggttg

SEQ ID NO: 4930 - RNA, 20 nt, synthetic construct
  source 1..20: mol_type = other RNA
ggggcccagagggagcacca

SEQ ID NO: 4931 - RNA, 20 nt, synthetic construct
  source 1..20: mol_type = other RNA
tttgtgaaggccagtcaggt

SEQ ID NO: 4932 - RNA, 20 nt, synthetic construct
  source 1..20: mol_type = other RNA
gcgtaacaatagcatcaccc

SEQ ID NO: 4933 - RNA, 20 nt, synthetic construct
  source 1..20: mol_type = other RNA
ctgcaacgcttgcctgtgcc

SEQ ID NO: 4934 - RNA, 20 nt, synthetic construct
  source 1..20: mol_type = other RNA
tgggctggggcacaggcaag

SEQ ID NO: 4935 - RNA, 20 nt, synthetic construct
  source 1..20: mol_type = other RNA
tggcagctgcagagaaaatg

SEQ ID NO: 4936 - RNA, 20 nt, synthetic construct
  source 1..20: mol_type = other RNA
ccttccctaggccaggaccc

SEQ ID NO: 4937 - RNA, 20 nt, synthetic construct
  source 1..20: mol_type = other RNA
ttcactgcagaggcagaaat

SEQ ID NO: 4938 - RNA, 20 nt, synthetic construct
  source 1..20: mol_type = other RNA
gaagactcagctgtgaccag

SEQ ID NO: 4939 - RNA, 20 nt, synthetic construct
  source 1..20: mol_type = other RNA
tcattcacctgcaaattctt

SEQ ID NO: 4940 - RNA, 20 nt, synthetic construct
  source 1..20: mol_type = other RNA
tgccccgagggaaggggtgg

SEQ ID NO: 4941 - RNA, 20 nt, synthetic construct
  source 1..20: mol_type = other RNA
caggagtgattccccacacc

SEQ ID NO: 4942 - RNA, 20 nt, synthetic construct
  source 1..20: mol_type = other RNA
ctcctgagattcagcaccac

SEQ ID NO: 4943 - RNA, 20 nt, synthetic construct
  source 1..20: mol_type = other RNA
tcctgctggcaggcccagca

SEQ ID NO: 4944 - RNA, 20 nt, synthetic construct
  source 1..20: mol_type = other RNA
gcagggggcttggggtagtg

SEQ ID NO: 4945 - RNA, 20 nt, synthetic construct
  source 1..20: mol_type = other RNA
cactccactaccccaagccc

SEQ ID NO: 4946 - RNA, 20 nt, synthetic construct
  source 1..20: mol_type = other RNA
tgcagcaagagccagggaga

SEQ ID NO: 4947 - RNA, 20 nt, synthetic construct
  source 1..20: mol_type = other RNA
ggtgtgtggtctccccatca

SEQ ID NO: 4948 - RNA, 20 nt, synthetic construct
  source 1..20: mol_type = other RNA
gcccaggaaggtcccggttg

SEQ ID NO: 4949 - RNA, 20 nt, synthetic construct
  source 1..20: mol_type = other RNA
tcgagcgtgaaaggggcctc

SEQ ID NO: 4950 - RNA, 20 nt, synthetic construct
  source 1..20: mol_type = other RNA
aaatgaggtatcttcgagcg

SEQ ID NO: 4951 - RNA, 20 nt, synthetic construct
  source 1..20: mol_type = other RNA
tccaaatgaggtatcttcga

SEQ ID NO: 4952 - RNA, 20 nt, synthetic construct
  source 1..20: mol_type = other RNA
gtcatttgcacatgagaaag

SEQ ID NO: 4953 - RNA, 20 nt, synthetic construct
  source 1..20: mol_type = other RNA
tggaatcttggaagtgatgg

SEQ ID NO: 4954 - RNA, 20 nt, synthetic construct
  source 1..20: mol_type = other RNA
tggaagtgatgggggtgttt

SEQ ID NO: 4955 - RNA, 20 nt, synthetic construct
  source 1..20: mol_type = other RNA
cttccaagattccaagatat

SEQ ID NO: 4956 - RNA, 20 nt, synthetic construct
  source 1..20: mol_type = other RNA
aacacccccatcacttccaa

SEQ ID NO: 4957 - RNA, 20 nt, synthetic construct
  source 1..20: mol_type = other RNA
tgtcaatgccctgcagccaa

SEQ ID NO: 4958 - RNA, 20 nt, synthetic construct
  source 1..20: mol_type = other RNA
ctccagggcctttccctctc

SEQ ID NO: 4959 - RNA, 20 nt, synthetic construct
  source 1..20: mol_type = other RNA
cagccctccctgggctcctc

SEQ ID NO: 4960 - RNA, 20 nt, synthetic construct
  source 1..20: mol_type = other RNA
caggctccagaatcagaaag

SEQ ID NO: 4961 - RNA, 20 nt, synthetic construct
  source 1..20: mol_type = other RNA
gaaagacctggttttacctt

SEQ ID NO: 4962 - RNA, 20 nt, synthetic construct
  source 1..20: mol_type = other RNA
tccccactgcataaatgtgg

SEQ ID NO: 4963 - RNA, 20 nt, synthetic construct
  source 1..20: mol_type = other RNA
ccctgtgctagtgtggaggg

SEQ ID NO: 4964 - RNA, 20 nt, synthetic construct
  source 1..20: mol_type = other RNA
tccatgactgcctattgccc

SEQ ID NO: 4965 - RNA, 20 nt, synthetic construct
  source 1..20: mol_type = other RNA
gacccatgcttgtcttgggg

SEQ ID NO: 4966 - RNA, 20 nt, synthetic construct
  source 1..20: mol_type = other RNA
ttacaaaatgatgccagtgt

SEQ ID NO: 4967 - RNA, 20 nt, synthetic construct
  source 1..20: mol_type = other RNA
tctttacaaaatgatgccag

SEQ ID NO: 4968 - RNA, 20 nt, synthetic construct
  source 1..20: mol_type = other RNA
ttattacatcatctttacaa

SEQ ID NO: 4969 - RNA, 20 nt, synthetic construct
  source 1..20: mol_type = other RNA
aaatatatagactcactcac

SEQ ID NO: 4970 - RNA, 20 nt, synthetic construct
  source 1..20: mol_type = other RNA
gtccacatcaaaatatatag

SEQ ID NO: 4971 - RNA, 20 nt, synthetic construct
  source 1..20: mol_type = other RNA
gctctctttctcttaattat

SEQ ID NO: 4972 - RNA, 20 nt, synthetic construct
  source 1..20: mol_type = other RNA
aggaaggagggaattaacaa

SEQ ID NO: 4973 - RNA, 20 nt, synthetic construct
  source 1..20: mol_type = other RNA
ccactttcagtcaatgaatt

SEQ ID NO: 4974 - RNA, 20 nt, synthetic construct
  source 1..20: mol_type = other RNA
caattcattgactgaaagtg

SEQ ID NO: 4975 - RNA, 20 nt, synthetic construct
  source 1..20: mol_type = other RNA
tgacaatccttttctctgct

SEQ ID NO: 4976 - RNA, 20 nt, synthetic construct
  source 1..20: mol_type = other RNA
ttttctctgctgctggaggt

SEQ ID NO: 4977 - RNA, 20 nt, synthetic construct
  source 1..20: mol_type = other RNA
caggaccacctccagcagca

SEQ ID NO: 4978 - RNA, 20 nt, synthetic construct
  source 1..20: mol_type = other RNA
agttctggccagtaagacct

SEQ ID NO: 4979 - RNA, 20 nt, synthetic construct
  source 1..20: mol_type = other RNA
gttgggggtcactttctgaa

SEQ ID NO: 4980 - RNA, 20 nt, synthetic construct
  source 1..20: mol_type = other RNA
gttttcaatgcctgcaaagg

SEQ ID NO: 4981 - RNA, 20 nt, synthetic construct
  source 1..20: mol_type = other RNA
cttggaatttccctcatgac

SEQ ID NO: 4982 - RNA, 20 nt, synthetic construct
  source 1..20: mol_type = other RNA
ctgtgaatctcttggaattt

SEQ ID NO: 4983 - RNA, 20 nt, synthetic construct
  source 1..20: mol_type = other RNA
cccagctgccccggcttccc

SEQ ID NO: 4984 - RNA, 20 nt, synthetic construct
  source 1..20: mol_type = other RNA
gcaggtggtgctgatgtccc

SEQ ID NO: 4985 - RNA, 20 nt, synthetic construct
  source 1..20: mol_type = other RNA
gcaccacctgcagatccccc

SEQ ID NO: 4986 - RNA, 20 nt, synthetic construct
  source 1..20: mol_type = other RNA
aggtcatctgcatgaaaatg

SEQ ID NO: 4987 - RNA, 20 nt, synthetic construct
  source 1..20: mol_type = other RNA
gcatgaaaatgaccttgagg

SEQ ID NO: 4988 - RNA, 20 nt, synthetic construct
  source 1..20: mol_type = other RNA
ccaaaacccagcccagcaac

SEQ ID NO: 4989 - RNA, 20 nt, synthetic construct
  source 1..20: mol_type = other RNA
gaccttcctccctggctgag

SEQ ID NO: 4990 - RNA, 20 nt, synthetic construct
  source 1..20: mol_type = other RNA
cagccagggaggaaggtcag

SEQ ID NO: 4991 - RNA, 20 nt, synthetic construct
  source 1..20: mol_type = other RNA
cctcctcgtcagggtgttaa

SEQ ID NO: 4992 - RNA, 20 nt, synthetic construct
  source 1..20: mol_type = other RNA
ccagcagcccgggccccagg

SEQ ID NO: 4993 - RNA, 20 nt, synthetic construct
  source 1..20: mol_type = other RNA
gtgctctgaggtccagggtg

SEQ ID NO: 4994 - RNA, 20 nt, synthetic construct
  source 1..20: mol_type = other RNA
ggtgcatgcccttggggtcc

SEQ ID NO: 4995 - RNA, 20 nt, synthetic construct
  source 1..20: mol_type = other RNA
aaaggaccccaagggcatgc

SEQ ID NO: 4996 - RNA, 20 nt, synthetic construct
  source 1..20: mol_type = other RNA
aaatggccagtcggggtgac

SEQ ID NO: 4997 - RNA, 20 nt, synthetic construct
  source 1..20: mol_type = other RNA
gaccactcagatcccgtcct

SEQ ID NO: 4998 - RNA, 20 nt, synthetic construct
  source 1..20: mol_type = other RNA
gagtggtcagatggcagccc

SEQ ID NO: 4999 - RNA, 20 nt, synthetic construct
  source 1..20: mol_type = other RNA
cgtccttcctccccctccat

SEQ ID NO: 5000 - RNA, 20 nt, synthetic construct
  source 1..20: mol_type = other RNA
aaaactgctttagaaagtcc

SEQ ID NO: 5001 - RNA, 20 nt, synthetic construct
  source 1..20: mol_type = other RNA
tgttggactttgcatctcct

SEQ ID NO: 5002 - RNA, 20 nt, synthetic construct
  source 1..20: mol_type = other RNA
cctcagtgaggggagagtga

SEQ ID NO: 5003 - RNA, 20 nt, synthetic construct
  source 1..20: mol_type = other RNA
ctctcccctcactgaggaga

SEQ ID NO: 5004 - RNA, 20 nt, synthetic construct
  source 1..20: mol_type = other RNA
gcagaacagtggcaatcact

SEQ ID NO: 5005 - RNA, 20 nt, synthetic construct
  source 1..20: mol_type = other RNA
cagctctgctacaaattcac

SEQ ID NO: 5006 - RNA, 20 nt, synthetic construct
  source 1..20: mol_type = other RNA
agaacatgagttctaatccc

SEQ ID NO: 5007 - RNA, 20 nt, synthetic construct
  source 1..20: mol_type = other RNA
ccgcctgggtcgtgtcccat

SEQ ID NO: 5008 - RNA, 20 nt, synthetic construct
  source 1..20: mol_type = other RNA
gctgccaaggcctagctttc

SEQ ID NO: 5009 - RNA, 20 nt, synthetic construct
  source 1..20: mol_type = other RNA
ccttccccctttcttccctc

SEQ ID NO: 5010 - RNA, 20 nt, synthetic construct
  source 1..20: mol_type = other RNA
tgaggagggaagaaaggggg

SEQ ID NO: 5011 - RNA, 20 nt, synthetic construct
  source 1..20: mol_type = other RNA
catggcccctcacagggtac

SEQ ID NO: 5012 - RNA, 20 nt, synthetic construct
  source 1..20: mol_type = other RNA
ctctggtgggtgtggtgggg

SEQ ID NO: 5013 - RNA, 20 nt, synthetic construct
  source 1..20: mol_type = other RNA
cttctgctggaccaggagct

SEQ ID NO: 5014 - RNA, 20 nt, synthetic construct
  source 1..20: mol_type = other RNA
ggcaaagaatgctgggaagg

SEQ ID NO: 5015 - RNA, 20 nt, synthetic construct
  source 1..20: mol_type = other RNA
gtggttcccacacttagggc

SEQ ID NO: 5016 - RNA, 20 nt, synthetic construct
  source 1..20: mol_type = other RNA
cctgaggagtttatgaaatg

SEQ ID NO: 5017 - RNA, 20 nt, synthetic construct
  source 1..20: mol_type = other RNA
gcatttcataaactcctcag

SEQ ID NO: 5018 - RNA, 20 nt, synthetic construct
  source 1..20: mol_type = other RNA
ccaggaactgggcccaggaa

SEQ ID NO: 5019 - RNA, 20 nt, synthetic construct
  source 1..20: mol_type = other RNA
gcaattctcaaagcgggagg

SEQ ID NO: 5020 - RNA, 20 nt, synthetic construct
  source 1..20: mol_type = other RNA
gagtggtggaatgaggctgc

SEQ ID NO: 5021 - RNA, 20 nt, synthetic construct
  source 1..20: mol_type = other RNA
cctgtccccactgacacatt

SEQ ID NO: 5022 - RNA, 20 nt, synthetic construct
  source 1..20: mol_type = other RNA
ttctcttttcatcattctct

SEQ ID NO: 5023 - RNA, 20 nt, synthetic construct
  source 1..20: mol_type = other RNA
ttctctagtgctcttatcac

SEQ ID NO: 5024 - RNA, 20 nt, synthetic construct
  source 1..20: mol_type = other RNA
ccaacttataggctgaacat

SEQ ID NO: 5025 - RNA, 20 nt, synthetic construct
  source 1..20: mol_type = other RNA
cttttctcatgcagccctca

SEQ ID NO: 5026 - RNA, 20 nt, synthetic construct
  source 1..20: mol_type = other RNA
tgttcactgctgtaccccaa

SEQ ID NO: 5027 - RNA, 20 nt, synthetic construct
  source 1..20: mol_type = other RNA
ccttccatgttacagacatt

SEQ ID NO: 5028 - RNA, 20 nt, synthetic construct
  source 1..20: mol_type = other RNA
agggaggttttgttctgttt

SEQ ID NO: 5029 - RNA, 20 nt, synthetic construct
  source 1..20: mol_type = other RNA
caaaaagaaaaaaaatgcaa

SEQ ID NO: 5030 - RNA, 20 nt, synthetic construct
  source 1..20: mol_type = other RNA
tgggtgacaagagggagact

SEQ ID NO: 5031 - RNA, 20 nt, synthetic construct
  source 1..20: mol_type = other RNA
cgccattgcacttcatcctg

SEQ ID NO: 5032 - RNA, 20 nt, synthetic construct
  source 1..20: mol_type = other RNA
cagctcaccacaacctccgc

SEQ ID NO: 5033 - RNA, 20 nt, synthetic construct
  source 1..20: mol_type = other RNA
cttgaacctgggaggcggag

SEQ ID NO: 5034 - RNA, 20 nt, synthetic construct
  source 1..20: mol_type = other RNA
cagctactcggtaggctgag

SEQ ID NO: 5035 - RNA, 20 nt, synthetic construct
  source 1..20: mol_type = other RNA
cctgaagtcaggagttcaag

SEQ ID NO: 5036 - RNA, 20 nt, synthetic construct
  source 1..20: mol_type = other RNA
acccgcctcagcctcccaac

SEQ ID NO: 5037 - RNA, 20 nt, synthetic construct
  source 1..20: mol_type = other RNA
taacacgttgggaggctgag

SEQ ID NO: 5038 - RNA, 20 nt, synthetic construct
  source 1..20: mol_type = other RNA
cttccaccctaaaaaaacaa

SEQ ID NO: 5039 - RNA, 20 nt, synthetic construct
  source 1..20: mol_type = other RNA
gagcgtgctgagaggctggc

SEQ ID NO: 5040 - RNA, 20 nt, synthetic construct
  source 1..20: mol_type = other RNA
aggcttactcaccctttttc

SEQ ID NO: 5041 - RNA, 20 nt, synthetic construct
  source 1..20: mol_type = other RNA
ccagtctccaccctctcctc

SEQ ID NO: 5042 - RNA, 20 nt, synthetic construct
  source 1..20: mol_type = other RNA
cccagagtcccctaacctca

SEQ ID NO: 5043 - RNA, 20 nt, synthetic construct
  source 1..20: mol_type = other RNA
cagtgtctccagctgggcca

SEQ ID NO: 5044 - RNA, 20 nt, synthetic construct
  source 1..20: mol_type = other RNA
gtggtccagttataatggtg

SEQ ID NO: 5045 - RNA, 20 nt, synthetic construct
  source 1..20: mol_type = other RNA
cgagctgccacctccaggaa

SEQ ID NO: 5046 - RNA, 20 nt, synthetic construct
  source 1..20: mol_type = other RNA
gggccggcttcctggaggtg

SEQ ID NO: 5047 - RNA, 20 nt, synthetic construct
  source 1..20: mol_type = other RNA
gactgagttcccgcagcacc

SEQ ID NO: 5048 - RNA, 20 nt, synthetic construct
  source 1..20: mol_type = other RNA
cagtcgcctgtgctctcatc

SEQ ID NO: 5049 - RNA, 20 nt, synthetic construct
  source 1..20: mol_type = other RNA
gcctccctgtggactctgag

SEQ ID NO: 5050 - RNA, 20 nt, synthetic construct
  source 1..20: mol_type = other RNA
tcagagtccacagggaggca

SEQ ID NO: 5051 - RNA, 20 nt, synthetic construct
  source 1..20: mol_type = other RNA
gccctcgcctcatcctcaga

SEQ ID NO: 5052 - RNA, 20 nt, synthetic construct
  source 1..20: mol_type = other RNA
gagcccacggcctgcccact

SEQ ID NO: 5053 - RNA, 20 nt, synthetic construct
  source 1..20: mol_type = other RNA
tgctccagcaccagcaaccc

SEQ ID NO: 5054 - RNA, 20 nt, synthetic construct
  source 1..20: mol_type = other RNA
agagagtggggcactgagag

SEQ ID NO: 5055 - RNA, 20 nt, synthetic construct
  source 1..20: mol_type = other RNA
ttgtccttctctcctccata

SEQ ID NO: 5056 - RNA, 20 nt, synthetic construct
  source 1..20: mol_type = other RNA
tatggaaccactgtcatgta

SEQ ID NO: 5057 - RNA, 20 nt, synthetic construct
  source 1..20: mol_type = other RNA
catcccctgtgacttgcacg

SEQ ID NO: 5058 - RNA, 20 nt, synthetic construct
  source 1..20: mol_type = other RNA
cctgtgacttgcacgtatac

SEQ ID NO: 5059 - RNA, 20 nt, synthetic construct
  source 1..20: mol_type = other RNA
gggcgtatacgtgcaagtca

SEQ ID NO: 5060 - RNA, 20 nt, synthetic construct
  source 1..20: mol_type = other RNA
caaaagaagtgaatatgccc

SEQ ID NO: 5061 - RNA, 20 nt, synthetic construct
  source 1..20: mol_type = other RNA
gttaaggtggggcagggcat

SEQ ID NO: 5062 - RNA, 20 nt, synthetic construct
  source 1..20: mol_type = other RNA
gttaaggcaaggaccagcca

SEQ ID NO: 5063 - RNA, 20 nt, synthetic construct
  source 1..20: mol_type = other RNA
tggctcaaaaagcacctcca

SEQ ID NO: 5064 - RNA, 20 nt, synthetic construct
  source 1..20: mol_type = other RNA
tataaaacggccctaccctt

SEQ ID NO: 5065 - RNA, 20 nt, synthetic construct
  source 1..20: mol_type = other RNA
cccttcgctgactctctttt

SEQ ID NO: 5066 - RNA, 20 nt, synthetic construct
  source 1..20: mol_type = other RNA
gtgtgaagagaccaccaaac

SEQ ID NO: 5067 - RNA, 20 nt, synthetic construct
  source 1..20: mol_type = other RNA
gagtaacggcaccaaatttc

SEQ ID NO: 5068 - RNA, 20 nt, synthetic construct
  source 1..20: mol_type = other RNA
ggggacctcccttgggagat

SEQ ID NO: 5069 - RNA, 20 nt, synthetic construct
  source 1..20: mol_type = other RNA
cccaagggaggtcccccgat

SEQ ID NO: 5070 - RNA, 20 nt, synthetic construct
  source 1..20: mol_type = other RNA
atcccctgtcctcctgctct

SEQ ID NO: 5071 - RNA, 20 nt, synthetic construct
  source 1..20: mol_type = other RNA
cctgtcctcctgctctttgc

SEQ ID NO: 5072 - RNA, 20 nt, synthetic construct
  source 1..20: mol_type = other RNA
ttctcatggagcaaagagca

SEQ ID NO: 5073 - RNA, 20 nt, synthetic construct
  source 1..20: mol_type = other RNA
acctacgacctcaggtcctc

SEQ ID NO: 5074 - RNA, 20 nt, synthetic construct
  source 1..20: mol_type = other RNA
caccaatttcaagtccggta

SEQ ID NO: 5075 - RNA, 20 nt, synthetic construct
  source 1..20: mol_type = other RNA
ctcaacctctttctcctttc

SEQ ID NO: 5076 - RNA, 20 nt, synthetic construct
  source 1..20: mol_type = other RNA
tggcgccacacttcaatctc

SEQ ID NO: 5077 - RNA, 20 nt, synthetic construct
  source 1..20: mol_type = other RNA
ctcccttctcttaatttcaa

SEQ ID NO: 5078 - RNA, 20 nt, synthetic construct
  source 1..20: mol_type = other RNA
atgaacccaaaaccccggtg

SEQ ID NO: 5079 - RNA, 20 nt, synthetic construct
  source 1..20: mol_type = other RNA
ttgcagggatgcctctctga

SEQ ID NO: 5080 - RNA, 20 nt, synthetic construct
  source 1..20: mol_type = other RNA
ctgcaatgattaaacaccaa

SEQ ID NO: 5081 - RNA, 20 nt, synthetic construct
  source 1..20: mol_type = other RNA
gagaggcatccctgcaatga

SEQ ID NO: 5082 - RNA, 20 nt, synthetic construct
  source 1..20: mol_type = other RNA
actcacgtttcaagggtgtc

SEQ ID NO: 5083 - RNA, 20 nt, synthetic construct
  source 1..20: mol_type = other RNA
cttatttccgcaccccaacc

SEQ ID NO: 5084 - RNA, 20 nt, synthetic construct
  source 1..20: mol_type = other RNA
ctgtgccccaatcccttatt

SEQ ID NO: 5085 - RNA, 20 nt, synthetic construct
  source 1..20: mol_type = other RNA
cttatttccgcaccctgacc

SEQ ID NO: 5086 - RNA, 20 nt, synthetic construct
  source 1..20: mol_type = other RNA
ctgtgccccaatcccttatt

SEQ ID NO: 5087 - RNA, 20 nt, synthetic construct
  source 1..20: mol_type = other RNA
cttatttccgtgtcccaacc

SEQ ID NO: 5088 - RNA, 20 nt, synthetic construct
  source 1..20: mol_type = other RNA
aaagtgccgttttctggcca

SEQ ID NO: 5089 - RNA, 20 nt, synthetic construct
  source 1..20: mol_type = other RNA
tacaagacctaaataatttt

SEQ ID NO: 5090 - RNA, 20 nt, synthetic construct
  source 1..20: mol_type = other RNA
gggaggaattgcattgggaa

SEQ ID NO: 5091 - RNA, 20 nt, synthetic construct
  source 1..20: mol_type = other RNA
tccttctttccctcccgcct

SEQ ID NO: 5092 - RNA, 20 nt, synthetic construct
  source 1..20: mol_type = other RNA
gacctttcccctcctcccca

SEQ ID NO: 5093 - RNA, 20 nt, synthetic construct
  source 1..20: mol_type = other RNA
ccaggccgagctaagtccca

SEQ ID NO: 5094 - RNA, 20 nt, synthetic construct
  source 1..20: mol_type = other RNA
ttttatcacctcccctcctc

SEQ ID NO: 5095 - RNA, 20 nt, synthetic construct
  source 1..20: mol_type = other RNA
cctcccctcctcacacccga

SEQ ID NO: 5096 - RNA, 20 nt, synthetic construct
  source 1..20: mol_type = other RNA
ggtgtgaggaggggaggtga

SEQ ID NO: 5097 - RNA, 20 nt, synthetic construct
  source 1..20: mol_type = other RNA
ggctcacagtttcgttccgt

SEQ ID NO: 5098 - RNA, 20 nt, synthetic construct
  source 1..20: mol_type = other RNA
acctttttaagagtaaattg

SEQ ID NO: 5099 - RNA, 20 nt, synthetic construct
  source 1..20: mol_type = other RNA
caaatcagatagcatttagg

SEQ ID NO: 5100 - RNA, 20 nt, synthetic construct
  source 1..20: mol_type = other RNA
gatagcatttaggctctttt

SEQ ID NO: 5101 - RNA, 20 nt, synthetic construct
  source 1..20: mol_type = other RNA
gatttgggataaagaaaaag

SEQ ID NO: 5102 - RNA, 20 nt, synthetic construct
  source 1..20: mol_type = other RNA
aatataaaaatccagcccag

SEQ ID NO: 5103 - RNA, 20 nt, synthetic construct
  source 1..20: mol_type = other RNA
agcccagttcatgactcgtt

SEQ ID NO: 5104 - RNA, 20 nt, synthetic construct
  source 1..20: mol_type = other RNA
actcctgacattaaataaaa

SEQ ID NO: 5105 - RNA, 20 nt, synthetic construct
  source 1..20: mol_type = other RNA
tgttgtgaggtttgagggct

SEQ ID NO: 5106 - RNA, 20 nt, synthetic construct
  source 1..20: mol_type = other RNA
ccagcacacaagaacttcca

SEQ ID NO: 5107 - RNA, 20 nt, synthetic construct
  source 1..20: mol_type = other RNA
ggccactgggccaaggaatg

SEQ ID NO: 5108 - RNA, 20 nt, synthetic construct
  source 1..20: mol_type = other RNA
cgggctgcgggcattccttg

SEQ ID NO: 5109 - RNA, 20 nt, synthetic construct
  source 1..20: mol_type = other RNA
gtgtgggaccccactgaaaa

SEQ ID NO: 5110 - RNA, 20 nt, synthetic construct
  source 1..20: mol_type = other RNA
gactgttcaactcacctggc

SEQ ID NO: 5111 - RNA, 20 nt, synthetic construct
  source 1..20: mol_type = other RNA
gggaaggagtcagtcagaga

SEQ ID NO: 5112 - RNA, 20 nt, synthetic construct
  source 1..20: mol_type = other RNA
tctcggcttagcggctgaag

SEQ ID NO: 5113 - RNA, 20 nt, synthetic construct
  source 1..20: mol_type = other RNA
ggcagtgtcagtcttcagcc

SEQ ID NO: 5114 - RNA, 20 nt, synthetic construct
  source 1..20: mol_type = other RNA
cctcggaagcccccagacca

SEQ ID NO: 5115 - RNA, 20 nt, synthetic construct
  source 1..20: mol_type = other RNA
cggacgccgagctttgggta

SEQ ID NO: 5116 - RNA, 20 nt, synthetic construct
  source 1..20: mol_type = other RNA
atacggaggctactcactcc

SEQ ID NO: 5117 - RNA, 20 nt, synthetic construct
  source 1..20: mol_type = other RNA
ccacctgcccagttccctta

SEQ ID NO: 5118 - RNA, 20 nt, synthetic construct
  source 1..20: mol_type = other RNA
gcttccctgactattcctgg

SEQ ID NO: 5119 - RNA, 20 nt, synthetic construct
  source 1..20: mol_type = other RNA
cattgccgcccttcttccca

SEQ ID NO: 5120 - RNA, 20 nt, synthetic construct
  source 1..20: mol_type = other RNA
aaagcctcctttgtgtcctc

SEQ ID NO: 5121 - RNA, 20 nt, synthetic construct
  source 1..20: mol_type = other RNA
tatacttgtgggttaaggtg

SEQ ID NO: 5122 - RNA, 20 nt, synthetic construct
  source 1..20: mol_type = other RNA
tgcaccccttaccatctcat

SEQ ID NO: 5123 - RNA, 20 nt, synthetic construct
  source 1..20: mol_type = other RNA
cattaaaacctaatcaccct

SEQ ID NO: 5124 - RNA, 20 nt, synthetic construct
  source 1..20: mol_type = other RNA
cccttaccccactcaatgcc

SEQ ID NO: 5125 - RNA, 20 nt, synthetic construct
  source 1..20: mol_type = other RNA
catcccgcagcacgctttaa

SEQ ID NO: 5126 - RNA, 20 nt, synthetic construct
  source 1..20: mol_type = other RNA
cgcagcacgctttaaaaaga

SEQ ID NO: 5127 - RNA, 20 nt, synthetic construct
  source 1..20: mol_type = other RNA
ttttaaagcgtgctgcggga

SEQ ID NO: 5128 - RNA, 20 nt, synthetic construct
  source 1..20: mol_type = other RNA
cttgcctgctacagcatggc

SEQ ID NO: 5129 - RNA, 20 nt, synthetic construct
  source 1..20: mol_type = other RNA
tgaactaacttgtaaggctt

SEQ ID NO: 5130 - RNA, 20 nt, synthetic construct
  source 1..20: mol_type = other RNA
gcgccttatcaaccaaattg

SEQ ID NO: 5131 - RNA, 20 nt, synthetic construct
  source 1..20: mol_type = other RNA
accaaattgttttgcctatc

SEQ ID NO: 5132 - RNA, 20 nt, synthetic construct
  source 1..20: mol_type = other RNA
accccgtggtgccaaaccca

SEQ ID NO: 5133 - RNA, 20 nt, synthetic construct
  source 1..20: mol_type = other RNA
tcaatacctgcctctataac

SEQ ID NO: 5134 - RNA, 20 nt, synthetic construct
  source 1..20: mol_type = other RNA
agaacagaataatgggttat

SEQ ID NO: 5135 - RNA, 20 nt, synthetic construct
  source 1..20: mol_type = other RNA
caaacatgctttctttacta

SEQ ID NO: 5136 - RNA, 20 nt, synthetic construct
  source 1..20: mol_type = other RNA
cagcctctcttcactttcac

SEQ ID NO: 5137 - RNA, 20 nt, synthetic construct
  source 1..20: mol_type = other RNA
agctcagcacattacctagg

SEQ ID NO: 5138 - RNA, 20 nt, synthetic construct
  source 1..20: mol_type = other RNA
agcccaaatttcttcctcat

SEQ ID NO: 5139 - RNA, 20 nt, synthetic construct
  source 1..20: mol_type = other RNA
gttacctatcttggcgtaat

SEQ ID NO: 5140 - RNA, 20 nt, synthetic construct
  source 1..20: mol_type = other RNA
tggcgtaattctcataaaaa

SEQ ID NO: 5141 - RNA, 20 nt, synthetic construct
  source 1..20: mol_type = other RNA
tgtccgactgatctctcaaa

SEQ ID NO: 5142 - RNA, 20 nt, synthetic construct
  source 1..20: mol_type = other RNA
gtcggacacgattggcaggg

SEQ ID NO: 5143 - RNA, 20 nt, synthetic construct
  source 1..20: mol_type = other RNA
ctcaaaccccagcaccttct

SEQ ID NO: 5144 - RNA, 20 nt, synthetic construct
  source 1..20: mol_type = other RNA
caaactatgctcaactcact

SEQ ID NO: 5145 - RNA, 20 nt, synthetic construct
  source 1..20: mol_type = other RNA
attttcttcctcatacctga

SEQ ID NO: 5146 - RNA, 20 nt, synthetic construct
  source 1..20: mol_type = other RNA
ggcctcccacattattcctg

SEQ ID NO: 5147 - RNA, 20 nt, synthetic construct
  source 1..20: mol_type = other RNA
ggaataatgtgggaggccag

SEQ ID NO: 5148 - RNA, 20 nt, synthetic construct
  source 1..20: mol_type = other RNA
ctctgatccacctgacattc

SEQ ID NO: 5149 - RNA, 20 nt, synthetic construct
  source 1..20: mol_type = other RNA
gagagatacagtcgtggggg

SEQ ID NO: 5150 - RNA, 20 nt, synthetic construct
  source 1..20: mol_type = other RNA
acctgacattcaccccattt

SEQ ID NO: 5151 - RNA, 20 nt, synthetic construct
  source 1..20: mol_type = other RNA
gggtgaggaacaggaaagaa

SEQ ID NO: 5152 - RNA, 20 nt, synthetic construct
  source 1..20: mol_type = other RNA
tgcttgatttattgatggca

SEQ ID NO: 5153 - RNA, 20 nt, synthetic construct
  source 1..20: mol_type = other RNA
agcatgatcagggtgaggaa

SEQ ID NO: 5154 - RNA, 20 nt, synthetic construct
  source 1..20: mol_type = other RNA
ataaatcaagcatgatcagg

SEQ ID NO: 5155 - RNA, 20 nt, synthetic construct
  source 1..20: mol_type = other RNA
ccacacaccagcaaaggcag

SEQ ID NO: 5156 - RNA, 20 nt, synthetic construct
  source 1..20: mol_type = other RNA
tggaaatctatcctcaagga

SEQ ID NO: 5157 - RNA, 20 nt, synthetic construct
  source 1..20: mol_type = other RNA
atcctcaaggaaataacttc

SEQ ID NO: 5158 - RNA, 20 nt, synthetic construct
  source 1..20: mol_type = other RNA
tcaaggaaataacttctcag

SEQ ID NO: 5159 - RNA, 20 nt, synthetic construct
  source 1..20: mol_type = other RNA
gctattctactactcctcag

SEQ ID NO: 5160 - RNA, 20 nt, synthetic construct
  source 1..20: mol_type = other RNA
ctgaggagtagtagaatagc

SEQ ID NO: 5161 - RNA, 20 nt, synthetic construct
  source 1..20: mol_type = other RNA
agctcgaggatttgccccac

SEQ ID NO: 5162 - RNA, 20 nt, synthetic construct
  source 1..20: mol_type = other RNA
tcgagcttgatgtgtaggga

SEQ ID NO: 5163 - RNA, 20 nt, synthetic construct
  source 1..20: mol_type = other RNA
gactcaggcatgttgagtaa

SEQ ID NO: 5164 - RNA, 20 nt, synthetic construct
  source 1..20: mol_type = other RNA
agtaactaaaatacctccag

SEQ ID NO: 5165 - RNA, 20 nt, synthetic construct
  source 1..20: mol_type = other RNA
cttcccttctgtcagacaca

SEQ ID NO: 5166 - RNA, 20 nt, synthetic construct
  source 1..20: mol_type = other RNA
gactgtattgaggtgggaag

SEQ ID NO: 5167 - RNA, 20 nt, synthetic construct
  source 1..20: mol_type = other RNA
gttatcagactgtattgagg

SEQ ID NO: 5168 - RNA, 20 nt, synthetic construct
  source 1..20: mol_type = other RNA
gccaagcattttttcaggct

SEQ ID NO: 5169 - RNA, 20 nt, synthetic construct
  source 1..20: mol_type = other RNA
cttacggtcctccgtcttca

SEQ ID NO: 5170 - RNA, 20 nt, synthetic construct
  source 1..20: mol_type = other RNA
ctttcccttctcagaattca

SEQ ID NO: 5171 - RNA, 20 nt, synthetic construct
  source 1..20: mol_type = other RNA
ctactatcttctgtctagtc

SEQ ID NO: 5172 - RNA, 20 nt, synthetic construct
  source 1..20: mol_type = other RNA
tctgtctagtcatactccta

SEQ ID NO: 5173 - RNA, 20 nt, synthetic construct
  source 1..20: mol_type = other RNA
cagctgatatctcccggtgg

SEQ ID NO: 5174 - RNA, 20 nt, synthetic construct
  source 1..20: mol_type = other RNA
gctgtgatggcttggagaaa

SEQ ID NO: 5175 - RNA, 20 nt, synthetic construct
  source 1..20: mol_type = other RNA
cccggtggtatcccaaaact

SEQ ID NO: 5176 - RNA, 20 nt, synthetic construct
  source 1..20: mol_type = other RNA
caaaactgccactcttaact

SEQ ID NO: 5177 - RNA, 20 nt, synthetic construct
  source 1..20: mol_type = other RNA
ttgctggcaggactatgctg

SEQ ID NO: 5178 - RNA, 20 nt, synthetic construct
  source 1..20: mol_type = other RNA
ccttaggcactctctaatta

SEQ ID NO: 5179 - RNA, 20 nt, synthetic construct
  source 1..20: mol_type = other RNA
aattagagagtgcctaagga

SEQ ID NO: 5180 - RNA, 20 nt, synthetic construct
  source 1..20: mol_type = other RNA
aggccatcaccaatcattct

SEQ ID NO: 5181 - RNA, 20 nt, synthetic construct
  source 1..20: mol_type = other RNA
ccaatcattctatacgacaa

SEQ ID NO: 5182 - RNA, 20 nt, synthetic construct
  source 1..20: mol_type = other RNA
ttctatacgacaaacgtttc

SEQ ID NO: 5183 - RNA, 20 nt, synthetic construct
  source 1..20: mol_type = other RNA
ccacaatatcaccccttacc

SEQ ID NO: 5184 - RNA, 20 nt, synthetic construct
  source 1..20: mol_type = other RNA
ccccttaccacaagatctcc

SEQ ID NO: 5185 - RNA, 20 nt, synthetic construct
  source 1..20: mol_type = other RNA
tgtggtaaggggtgatattg

SEQ ID NO: 5186 - RNA, 20 nt, synthetic construct
  source 1..20: mol_type = other RNA
cccttcagcttaatctctcc

SEQ ID NO: 5187 - RNA, 20 nt, synthetic construct
  source 1..20: mol_type = other RNA
ctcccattctaggttcccac

SEQ ID NO: 5188 - RNA, 20 nt, synthetic construct
  source 1..20: mol_type = other RNA
cgcttgaagcagccctgaga

SEQ ID NO: 5189 - RNA, 20 nt, synthetic construct
  source 1..20: mol_type = other RNA
cccattctctctccatacca

SEQ ID NO: 5190 - RNA, 20 nt, synthetic construct
  source 1..20: mol_type = other RNA
catcccctgtgacttgcatg

SEQ ID NO: 5191 - RNA, 20 nt, synthetic construct
  source 1..20: mol_type = other RNA
cctgtgacttgcatgtatac

SEQ ID NO: 5192 - RNA, 20 nt, synthetic construct
  source 1..20: mol_type = other RNA
gggcgtatacatgcaagtca

SEQ ID NO: 5193 - RNA, 20 nt, synthetic construct
  source 1..20: mol_type = other RNA
caaaagaagtgaatatgccc

SEQ ID NO: 5194 - RNA, 20 nt, synthetic construct
  source 1..20: mol_type = other RNA
gttaaggtggggcagggcat

SEQ ID NO: 5195 - RNA, 20 nt, synthetic construct
  source 1..20: mol_type = other RNA
gttaaggcaaggaccggcca

SEQ ID NO: 5196 - RNA, 20 nt, synthetic construct
  source 1..20: mol_type = other RNA
tggctcaaaaagcaccccca

SEQ ID NO: 5197 - RNA, 20 nt, synthetic construct
  source 1..20: mol_type = other RNA
ggcgggtaggagtgcggggt

SEQ ID NO: 5198 - RNA, 20 nt, synthetic construct
  source 1..20: mol_type = other RNA
tataaaacggccccaccctt

SEQ ID NO: 5199 - RNA, 20 nt, synthetic construct
  source 1..20: mol_type = other RNA
cccttcgctgactctctttt

SEQ ID NO: 5200 - RNA, 20 nt, synthetic construct
  source 1..20: mol_type = other RNA
ggtgaaaatagccattgtaa

SEQ ID NO: 5201 - RNA, 20 nt, synthetic construct
  source 1..20: mol_type = other RNA
gtgtagggcacttagcatga

SEQ ID NO: 5202 - RNA, 20 nt, synthetic construct
  source 1..20: mol_type = other RNA
aaacatagaaatagtatagt

SEQ ID NO: 5203 - RNA, 20 nt, synthetic construct
  source 1..20: mol_type = other RNA
cggctcactgcaagctctgc

SEQ ID NO: 5204 - RNA, 20 nt, synthetic construct
  source 1..20: mol_type = other RNA
tggctaacatggtgaaaacc

SEQ ID NO: 5205 - RNA, 20 nt, synthetic construct
  source 1..20: mol_type = other RNA
agaccatcctggctaacatg

SEQ ID NO: 5206 - RNA, 20 nt, synthetic construct
  source 1..20: mol_type = other RNA
cctgacctcgtgatccaccc

SEQ ID NO: 5207 - RNA, 20 nt, synthetic construct
  source 1..20: mol_type = other RNA
cgaggtcaggagatcgagac

SEQ ID NO: 5208 - RNA, 20 nt, synthetic construct
  source 1..20: mol_type = other RNA
acccgcctcggcctcccaaa

SEQ ID NO: 5209 - RNA, 20 nt, synthetic construct
  source 1..20: mol_type = other RNA
cagcactttgggaggccgag

SEQ ID NO: 5210 - RNA, 20 nt, synthetic construct
  source 1..20: mol_type = other RNA
agggccgggtgcggtggctc

SEQ ID NO: 5211 - RNA, 20 nt, synthetic construct
  source 1..20: mol_type = other RNA
catatagtctcggtgtgtag

SEQ ID NO: 5212 - RNA, 20 nt, synthetic construct
  source 1..20: mol_type = other RNA
aggtctaactatatgatatt

SEQ ID NO: 5213 - RNA, 20 nt, synthetic construct
  source 1..20: mol_type = other RNA
tatagttagacctagatggg

SEQ ID NO: 5214 - RNA, 20 nt, synthetic construct
  source 1..20: mol_type = other RNA
atatgtccctggcaattttg

SEQ ID NO: 5215 - RNA, 20 nt, synthetic construct
  source 1..20: mol_type = other RNA
gattacaccggaagacttag

SEQ ID NO: 5216 - RNA, 20 nt, synthetic construct
  source 1..20: mol_type = other RNA
gatgacaggaacttcaatac

SEQ ID NO: 5217 - RNA, 20 nt, synthetic construct
  source 1..20: mol_type = other RNA
cccagcaggtgaaagggcta

SEQ ID NO: 5218 - RNA, 20 nt, synthetic construct
  source 1..20: mol_type = other RNA
tagtgacaagggcaagagta

SEQ ID NO: 5219 - RNA, 20 nt, synthetic construct
  source 1..20: mol_type = other RNA
cccctcctcccagcccagac

SEQ ID NO: 5220 - RNA, 20 nt, synthetic construct
  source 1..20: mol_type = other RNA
accctccccacatcctcgta

SEQ ID NO: 5221 - RNA, 20 nt, synthetic construct
  source 1..20: mol_type = other RNA
tcgtactagttattgtactc

SEQ ID NO: 5222 - RNA, 20 nt, synthetic construct
  source 1..20: mol_type = other RNA
cactctacttaaactcagcc

SEQ ID NO: 5223 - RNA, 20 nt, synthetic construct
  source 1..20: mol_type = other RNA
cagtaaaagcgtatataata

SEQ ID NO: 5224 - RNA, 20 nt, synthetic construct
  source 1..20: mol_type = other RNA
agtattttttaaacaactct

SEQ ID NO: 5225 - RNA, 20 nt, synthetic construct
  source 1..20: mol_type = other RNA
cttcgtctgtgaaatggcaa

SEQ ID NO: 5226 - RNA, 20 nt, synthetic construct
  source 1..20: mol_type = other RNA
ttctcccccagcctgcctta

SEQ ID NO: 5227 - RNA, 20 nt, synthetic construct
  source 1..20: mol_type = other RNA
tctccctacctgcctgcctg

SEQ ID NO: 5228 - RNA, 20 nt, synthetic construct
  source 1..20: mol_type = other RNA
ccctacctgcctgcctgtgc

SEQ ID NO: 5229 - RNA, 20 nt, synthetic construct
  source 1..20: mol_type = other RNA
caggggaaggtggaaaagga

SEQ ID NO: 5230 - RNA, 20 nt, synthetic construct
  source 1..20: mol_type = other RNA
tctagacaagggtgcagcca

SEQ ID NO: 5231 - RNA, 20 nt, synthetic construct
  source 1..20: mol_type = other RNA
tagtgcacaggtggaaggct

SEQ ID NO: 5232 - RNA, 20 nt, synthetic construct
  source 1..20: mol_type = other RNA
atcccttctcacctcctaag

SEQ ID NO: 5233 - RNA, 20 nt, synthetic construct
  source 1..20: mol_type = other RNA
cttctcacctcctaagagat

SEQ ID NO: 5234 - RNA, 20 nt, synthetic construct
  source 1..20: mol_type = other RNA
cttaggaggtgagaagggat

SEQ ID NO: 5235 - RNA, 20 nt, synthetic construct
  source 1..20: mol_type = other RNA
gctctgggccatcatccatc

SEQ ID NO: 5236 - RNA, 20 nt, synthetic construct
  source 1..20: mol_type = other RNA
tccatcttcctgcttcccca

SEQ ID NO: 5237 - RNA, 20 nt, synthetic construct
  source 1..20: mol_type = other RNA
atcttcctgcttccccaagg

SEQ ID NO: 5238 - RNA, 20 nt, synthetic construct
  source 1..20: mol_type = other RNA
tcctgcttccccaaggatat

SEQ ID NO: 5239 - RNA, 20 nt, synthetic construct
  source 1..20: mol_type = other RNA
ttggggaagcaggaagatgg

SEQ ID NO: 5240 - RNA, 20 nt, synthetic construct
  source 1..20: mol_type = other RNA
ctttcaaggttttccctata

SEQ ID NO: 5241 - RNA, 20 nt, synthetic construct
  source 1..20: mol_type = other RNA
ccaggaaggcctgtgtagag

SEQ ID NO: 5242 - RNA, 20 nt, synthetic construct
  source 1..20: mol_type = other RNA
ccacatggctaaatcagaac

SEQ ID NO: 5243 - RNA, 20 nt, synthetic construct
  source 1..20: mol_type = other RNA
gaacaccggaccccagcatc

SEQ ID NO: 5244 - RNA, 20 nt, synthetic construct
  source 1..20: mol_type = other RNA
gactgattttcctttctcac

SEQ ID NO: 5245 - RNA, 20 nt, synthetic construct
  source 1..20: mol_type = other RNA
gtcagatgctggggtccggt

SEQ ID NO: 5246 - RNA, 20 nt, synthetic construct
  source 1..20: mol_type = other RNA
cgagggagcatgtccaggag

SEQ ID NO: 5247 - RNA, 20 nt, synthetic construct
  source 1..20: mol_type = other RNA
ctgtgagtcccctgtcattg

SEQ ID NO: 5248 - RNA, 20 nt, synthetic construct
  source 1..20: mol_type = other RNA
acgtaattcaatgacagggg

SEQ ID NO: 5249 - RNA, 20 nt, synthetic construct
  source 1..20: mol_type = other RNA
cccctaagttccatgtgaca

SEQ ID NO: 5250 - RNA, 20 nt, synthetic construct
  source 1..20: mol_type = other RNA
ggtgaatggctcaaacccat

SEQ ID NO: 5251 - RNA, 20 nt, synthetic construct
  source 1..20: mol_type = other RNA
catctgtggacaaatacaaa

SEQ ID NO: 5252 - RNA, 20 nt, synthetic construct
  source 1..20: mol_type = other RNA
gtggacaaatacaaatacac

SEQ ID NO: 5253 - RNA, 20 nt, synthetic construct
  source 1..20: mol_type = other RNA
gaggcagcagtgggactctg

SEQ ID NO: 5254 - RNA, 20 nt, synthetic construct
  source 1..20: mol_type = other RNA
aagccactaccagtgtggct

SEQ ID NO: 5255 - RNA, 20 nt, synthetic construct
  source 1..20: mol_type = other RNA
attttccaaatagcactcac

SEQ ID NO: 5256 - RNA, 20 nt, synthetic construct
  source 1..20: mol_type = other RNA
tcaaaaattataaatcagat

SEQ ID NO: 5257 - RNA, 20 nt, synthetic construct
  source 1..20: mol_type = other RNA
gatcatgtccctctgatatg

SEQ ID NO: 5258 - RNA, 20 nt, synthetic construct
  source 1..20: mol_type = other RNA
gatttataatttttgaggat

SEQ ID NO: 5259 - RNA, 20 nt, synthetic construct
  source 1..20: mol_type = other RNA
tgtccctctgatatggtttc

SEQ ID NO: 5260 - RNA, 20 nt, synthetic construct
  source 1..20: mol_type = other RNA
gagggacatgatctgattta

SEQ ID NO: 5261 - RNA, 20 nt, synthetic construct
  source 1..20: mol_type = other RNA
cagcttgaattgtatttccc

SEQ ID NO: 5262 - RNA, 20 nt, synthetic construct
  source 1..20: mol_type = other RNA
tgggggatggtctttcccat

SEQ ID NO: 5263 - RNA, 20 nt, synthetic construct
  source 1..20: mol_type = other RNA
cccatgattcaattacctcc

SEQ ID NO: 5264 - RNA, 20 nt, synthetic construct
  source 1..20: mol_type = other RNA
cctgagacttattcactacc

SEQ ID NO: 5265 - RNA, 20 nt, synthetic construct
  source 1..20: mol_type = other RNA
gatgggtttatcaggggttt

SEQ ID NO: 5266 - RNA, 20 nt, synthetic construct
  source 1..20: mol_type = other RNA
gatctcctgagacttattca

SEQ ID NO: 5267 - RNA, 20 nt, synthetic construct
  source 1..20: mol_type = other RNA
ggggtttccatttttgcttc

SEQ ID NO: 5268 - RNA, 20 nt, synthetic construct
  source 1..20: mol_type = other RNA
tgacgggaaacgaaaggcac

SEQ ID NO: 5269 - RNA, 20 nt, synthetic construct
  source 1..20: mol_type = other RNA
gcagcataaaaatggactaa

SEQ ID NO: 5270 - RNA, 20 nt, synthetic construct
  source 1..20: mol_type = other RNA
agtaaattggtactgagagt

SEQ ID NO: 5271 - RNA, 20 nt, synthetic construct
  source 1..20: mol_type = other RNA
tttaagcaacaccccactct

SEQ ID NO: 5272 - RNA, 20 nt, synthetic construct
  source 1..20: mol_type = other RNA
ctatgagtatttttgtcaaa

SEQ ID NO: 5273 - RNA, 20 nt, synthetic construct
  source 1..20: mol_type = other RNA
gccccctctgagaccacctc

SEQ ID NO: 5274 - RNA, 20 nt, synthetic construct
  source 1..20: mol_type = other RNA
caagggcaggggcaaaatgt

SEQ ID NO: 5275 - RNA, 20 nt, synthetic construct
  source 1..20: mol_type = other RNA
tctctctcaagttcgacgtt

SEQ ID NO: 5276 - RNA, 20 nt, synthetic construct
  source 1..20: mol_type = other RNA
ggtggaagaaatttctaagc

SEQ ID NO: 5277 - RNA, 20 nt, synthetic construct
  source 1..20: mol_type = other RNA
tcaaaaccatggagaaaatg

SEQ ID NO: 5278 - RNA, 20 nt, synthetic construct
  source 1..20: mol_type = other RNA
caggcctagagccccaggag

SEQ ID NO: 5279 - RNA, 20 nt, synthetic construct
  source 1..20: mol_type = other RNA
aggtggaggttcccaaacct

SEQ ID NO: 5280 - RNA, 20 nt, synthetic construct
  source 1..20: mol_type = other RNA
aagcatttcctacgtcttct

SEQ ID NO: 5281 - RNA, 20 nt, synthetic construct
  source 1..20: mol_type = other RNA
ctactggggcattgcctagt

SEQ ID NO: 5282 - RNA, 20 nt, synthetic construct
  source 1..20: mol_type = other RNA
accattctggggtctggagg

SEQ ID NO: 5283 - RNA, 20 nt, synthetic construct
  source 1..20: mol_type = other RNA
actgacaacttgcactgttc

SEQ ID NO: 5284 - RNA, 20 nt, synthetic construct
  source 1..20: mol_type = other RNA
gcagacaatcaatgccagcc

SEQ ID NO: 5285 - RNA, 20 nt, synthetic construct
  source 1..20: mol_type = other RNA
atgccagcccatgaaagctg

SEQ ID NO: 5286 - RNA, 20 nt, synthetic construct
  source 1..20: mol_type = other RNA
gcgtgacctggatgtgagat

SEQ ID NO: 5287 - RNA, 20 nt, synthetic construct
  source 1..20: mol_type = other RNA
aggtcacgctgatgcaagag

SEQ ID NO: 5288 - RNA, 20 nt, synthetic construct
  source 1..20: mol_type = other RNA
cacatccaggtcacgctgat

SEQ ID NO: 5289 - RNA, 20 nt, synthetic construct
  source 1..20: mol_type = other RNA
cctttgactccacatctcac

SEQ ID NO: 5290 - RNA, 20 nt, synthetic construct
  source 1..20: mol_type = other RNA
ttttggagctttaaaatttg

SEQ ID NO: 5291 - RNA, 20 nt, synthetic construct
  source 1..20: mol_type = other RNA
agtggtgcagtcaaatttta

SEQ ID NO: 5292 - RNA, 20 nt, synthetic construct
  source 1..20: mol_type = other RNA
ctattgtatctagaaagtaa

SEQ ID NO: 5293 - RNA, 20 nt, synthetic construct
  source 1..20: mol_type = other RNA
agaaagtaaccagcttgctt

SEQ ID NO: 5294 - RNA, 20 nt, synthetic construct
  source 1..20: mol_type = other RNA
aaagcaagctggttactttc

SEQ ID NO: 5295 - RNA, 20 nt, synthetic construct
  source 1..20: mol_type = other RNA
gagacaaggcaagtcccttc

SEQ ID NO: 5296 - RNA, 20 nt, synthetic construct
  source 1..20: mol_type = other RNA
tgccttcccaacagtctctc

SEQ ID NO: 5297 - RNA, 20 nt, synthetic construct
  source 1..20: mol_type = other RNA
ttctgcccctgacccctcca

SEQ ID NO: 5298 - RNA, 20 nt, synthetic construct
  source 1..20: mol_type = other RNA
tggggctggtctttcccatg

SEQ ID NO: 5299 - RNA, 20 nt, synthetic construct
  source 1..20: mol_type = other RNA
cgagaatagcatgggaaaga

SEQ ID NO: 5300 - RNA, 20 nt, synthetic construct
  source 1..20: mol_type = other RNA
tatgagacttattcactatc

SEQ ID NO: 5301 - RNA, 20 nt, synthetic construct
  source 1..20: mol_type = other RNA
gatgggattatcaggggttt

SEQ ID NO: 5302 - RNA, 20 nt, synthetic construct
  source 1..20: mol_type = other RNA
gatcctatgagacttattca

SEQ ID NO: 5303 - RNA, 20 nt, synthetic construct
  source 1..20: mol_type = other RNA
catcagatcctatgagactt

SEQ ID NO: 5304 - RNA, 20 nt, synthetic construct
  source 1..20: mol_type = other RNA
ggggtttctgcttttgtatc

SEQ ID NO: 5305 - RNA, 20 nt, synthetic construct
  source 1..20: mol_type = other RNA
tttttattttctcttgctgt

SEQ ID NO: 5306 - RNA, 20 nt, synthetic construct
  source 1..20: mol_type = other RNA
cggcaggaggcgaaaagcac

SEQ ID NO: 5307 - RNA, 20 nt, synthetic construct
  source 1..20: mol_type = other RNA
gcagcatgaaaacgaactaa

SEQ ID NO: 5308 - RNA, 20 nt, synthetic construct
  source 1..20: mol_type = other RNA
ctgggctgttccagtctggg

SEQ ID NO: 5309 - RNA, 20 nt, synthetic construct
  source 1..20: mol_type = other RNA
ccatctcacacagtacatgt

SEQ ID NO: 5310 - RNA, 20 nt, synthetic construct
  source 1..20: mol_type = other RNA
cacacagtacatgtttgatt

SEQ ID NO: 5311 - RNA, 20 nt, synthetic construct
  source 1..20: mol_type = other RNA
aacatgtactgtgtgagatg

SEQ ID NO: 5312 - RNA, 20 nt, synthetic construct
  source 1..20: mol_type = other RNA
ctgcccctgtgcagccctcc

SEQ ID NO: 5313 - RNA, 20 nt, synthetic construct
  source 1..20: mol_type = other RNA
atagaatccctgcccctgtg

SEQ ID NO: 5314 - RNA, 20 nt, synthetic construct
  source 1..20: mol_type = other RNA
tgttcactgccatacccagc

SEQ ID NO: 5315 - RNA, 20 nt, synthetic construct
  source 1..20: mol_type = other RNA
agaacagtccctggtacata

SEQ ID NO: 5316 - RNA, 20 nt, synthetic construct
  source 1..20: mol_type = other RNA
ctagcaccaagctagagcct

SEQ ID NO: 5317 - RNA, 20 nt, synthetic construct
  source 1..20: mol_type = other RNA
ttggcatccctagcaccaag

SEQ ID NO: 5318 - RNA, 20 nt, synthetic construct
  source 1..20: mol_type = other RNA
gtcttccccacgggtcgtga

SEQ ID NO: 5319 - RNA, 20 nt, synthetic construct
  source 1..20: mol_type = other RNA
gtcaccttccatgtagcccc

SEQ ID NO: 5320 - RNA, 20 nt, synthetic construct
  source 1..20: mol_type = other RNA
cacagctatgggtcagagtg

SEQ ID NO: 5321 - RNA, 20 nt, synthetic construct
  source 1..20: mol_type = other RNA
ctgtttaatagacaagaaaa

SEQ ID NO: 5322 - RNA, 20 nt, synthetic construct
  source 1..20: mol_type = other RNA
tctctgtttaatagacaaga

SEQ ID NO: 5323 - RNA, 20 nt, synthetic construct
  source 1..20: mol_type = other RNA
ttcctgtctcattcgcccca

SEQ ID NO: 5324 - RNA, 20 nt, synthetic construct
  source 1..20: mol_type = other RNA
taaaataaacatggctcctc

SEQ ID NO: 5325 - RNA, 20 nt, synthetic construct
  source 1..20: mol_type = other RNA
cggctcaccgcaacctctgc

SEQ ID NO: 5326 - RNA, 20 nt, synthetic construct
  source 1..20: mol_type = other RNA
cagctactagggaggctggg

SEQ ID NO: 5327 - RNA, 20 nt, synthetic construct
  source 1..20: mol_type = other RNA
ctactaaaatacaaaaatta

SEQ ID NO: 5328 - RNA, 20 nt, synthetic construct
  source 1..20: mol_type = other RNA
attgaggtcaggagttcgag

SEQ ID NO: 5329 - RNA, 20 nt, synthetic construct
  source 1..20: mol_type = other RNA
gtctgcctcggactcccaaa

SEQ ID NO: 5330 - RNA, 20 nt, synthetic construct
  source 1..20: mol_type = other RNA
cagcattttgggagtccgag

SEQ ID NO: 5331 - RNA, 20 nt, synthetic construct
  source 1..20: mol_type = other RNA
tgtttaaaattgtaaaatag

SEQ ID NO: 5332 - RNA, 20 nt, synthetic construct
  source 1..20: mol_type = other RNA
agactctcttataattccat

SEQ ID NO: 5333 - RNA, 20 nt, synthetic construct
  source 1..20: mol_type = other RNA
tatgttgtttatgcagagac

SEQ ID NO: 5334 - RNA, 20 nt, synthetic construct
  source 1..20: mol_type = other RNA
catttcaataaagtggttac

SEQ ID NO: 5335 - RNA, 20 nt, synthetic construct
  source 1..20: mol_type = other RNA
taacatgctgtttaaaagtt

SEQ ID NO: 5336 - RNA, 20 nt, synthetic construct
  source 1..20: mol_type = other RNA
ataacttttaaacagcatgt

SEQ ID NO: 5337 - RNA, 20 nt, synthetic construct
  source 1..20: mol_type = other RNA
ttccatgtcaatatataaac

SEQ ID NO: 5338 - RNA, 20 nt, synthetic construct
  source 1..20: mol_type = other RNA
caccatatgaacagactaaa

SEQ ID NO: 5339 - RNA, 20 nt, synthetic construct
  source 1..20: mol_type = other RNA
gtccctccattgatgaatgt

SEQ ID NO: 5340 - RNA, 20 nt, synthetic construct
  source 1..20: mol_type = other RNA
atggagggacagattttagt

SEQ ID NO: 5341 - RNA, 20 nt, synthetic construct
  source 1..20: mol_type = other RNA
aaacattcatcaatggaggg

SEQ ID NO: 5342 - RNA, 20 nt, synthetic construct
  source 1..20: mol_type = other RNA
gccagggtgtcatatattac

SEQ ID NO: 5343 - RNA, 20 nt, synthetic construct
  source 1..20: mol_type = other RNA
aagtgagagttttattagag

SEQ ID NO: 5344 - RNA, 20 nt, synthetic construct
  source 1..20: mol_type = other RNA
acatgttgcagtcggagcca

SEQ ID NO: 5345 - RNA, 20 nt, synthetic construct
  source 1..20: mol_type = other RNA
ggtcccgctgctgggagcca

SEQ ID NO: 5346 - RNA, 20 nt, synthetic construct
  source 1..20: mol_type = other RNA
tgggccattgggccagctcc

SEQ ID NO: 5347 - RNA, 20 nt, synthetic construct
  source 1..20: mol_type = other RNA
ttgaatggtgggtgtacatc

SEQ ID NO: 5348 - RNA, 20 nt, synthetic construct
  source 1..20: mol_type = other RNA
ctggggtccttgctagatta

SEQ ID NO: 5349 - RNA, 20 nt, synthetic construct
  source 1..20: mol_type = other RNA
agcaaggaccccagcgatgt

SEQ ID NO: 5350 - RNA, 20 nt, synthetic construct
  source 1..20: mol_type = other RNA
ttgtgcaaacggagagcaac

SEQ ID NO: 5351 - RNA, 20 nt, synthetic construct
  source 1..20: mol_type = other RNA
ttagtacctctttgtccact

SEQ ID NO: 5352 - RNA, 20 nt, synthetic construct
  source 1..20: mol_type = other RNA
taaggaaataattaggcaag

SEQ ID NO: 5353 - RNA, 20 nt, synthetic construct
  source 1..20: mol_type = other RNA
aatagctaggtcagtatata

SEQ ID NO: 5354 - RNA, 20 nt, synthetic construct
  source 1..20: mol_type = other RNA
ctagtcagtagcaaactgtg

SEQ ID NO: 5355 - RNA, 20 nt, synthetic construct
  source 1..20: mol_type = other RNA
aattctggctgtttttgtac

SEQ ID NO: 5356 - RNA, 20 nt, synthetic construct
  source 1..20: mol_type = other RNA
gggagaaaaaatgagttacg

SEQ ID NO: 5357 - RNA, 20 nt, synthetic construct
  source 1..20: mol_type = other RNA
cagtggaagccaagatatta

SEQ ID NO: 5358 - RNA, 20 nt, synthetic construct
  source 1..20: mol_type = other RNA
tggcttccactgggatttac

SEQ ID NO: 5359 - RNA, 20 nt, synthetic construct
  source 1..20: mol_type = other RNA
ttttttaatatcttggcttc

SEQ ID NO: 5360 - RNA, 20 nt, synthetic construct
  source 1..20: mol_type = other RNA
tataaaaattgtcctccttt

SEQ ID NO: 5361 - RNA, 20 nt, synthetic construct
  source 1..20: mol_type = other RNA
tgataaggaggaggcctttc

SEQ ID NO: 5362 - RNA, 20 nt, synthetic construct
  source 1..20: mol_type = other RNA
agatcatataaaaattgtcc

SEQ ID NO: 5363 - RNA, 20 nt, synthetic construct
  source 1..20: mol_type = other RNA
agaagtcatgaaataaaagg

SEQ ID NO: 5364 - RNA, 20 nt, synthetic construct
  source 1..20: mol_type = other RNA
gccttttatttcatgacttc

SEQ ID NO: 5365 - RNA, 20 nt, synthetic construct
  source 1..20: mol_type = other RNA
atcaacaaactggaaaatag

SEQ ID NO: 5366 - RNA, 20 nt, synthetic construct
  source 1..20: mol_type = other RNA
acaaactggaaaatagattt

SEQ ID NO: 5367 - RNA, 20 nt, synthetic construct
  source 1..20: mol_type = other RNA
attttccagtttgttgattg

SEQ ID NO: 5368 - RNA, 20 nt, synthetic construct
  source 1..20: mol_type = other RNA
tcaaacaaaagctccacagc

SEQ ID NO: 5369 - RNA, 20 nt, synthetic construct
  source 1..20: mol_type = other RNA
aacaaaagctccacagccaa

SEQ ID NO: 5370 - RNA, 20 nt, synthetic construct
  source 1..20: mol_type = other RNA
acatttgtttgtctttgaac

SEQ ID NO: 5371 - RNA, 20 nt, synthetic construct
  source 1..20: mol_type = other RNA
caccaagtgcccagaaggag

SEQ ID NO: 5372 - RNA, 20 nt, synthetic construct
  source 1..20: mol_type = other RNA
ttcagaacattgctgaacac

SEQ ID NO: 5373 - RNA, 20 nt, synthetic construct
  source 1..20: mol_type = other RNA
gtctggttctggggtgaggg

SEQ ID NO: 5374 - RNA, 20 nt, synthetic construct
  source 1..20: mol_type = other RNA
aggactttgcttcactactt

SEQ ID NO: 5375 - RNA, 20 nt, synthetic construct
  source 1..20: mol_type = other RNA
caggggcttgaaatgtcaaa

SEQ ID NO: 5376 - RNA, 20 nt, synthetic construct
  source 1..20: mol_type = other RNA
gaataggctaggttctgctt

SEQ ID NO: 5377 - RNA, 20 nt, synthetic construct
  source 1..20: mol_type = other RNA
atcagaataggctaggttct

SEQ ID NO: 5378 - RNA, 20 nt, synthetic construct
  source 1..20: mol_type = other RNA
tcaatatagagcattcatgt

SEQ ID NO: 5379 - RNA, 20 nt, synthetic construct
  source 1..20: mol_type = other RNA
atatagagcattcatgtgcc

SEQ ID NO: 5380 - RNA, 20 nt, synthetic construct
  source 1..20: mol_type = other RNA
cgaaattccacttccaggaa

SEQ ID NO: 5381 - RNA, 20 nt, synthetic construct
  source 1..20: mol_type = other RNA
gtttcataaattcctggaag

SEQ ID NO: 5382 - RNA, 20 nt, synthetic construct
  source 1..20: mol_type = other RNA
atagctgtttgcacatgtga

SEQ ID NO: 5383 - RNA, 20 nt, synthetic construct
  source 1..20: mol_type = other RNA
aagttgccatgtctgtcctt

SEQ ID NO: 5384 - RNA, 20 nt, synthetic construct
  source 1..20: mol_type = other RNA
gcaaccagaaaaataaggca

SEQ ID NO: 5385 - RNA, 20 nt, synthetic construct
  source 1..20: mol_type = other RNA
actgccttatttttctggtt

SEQ ID NO: 5386 - RNA, 20 nt, synthetic construct
  source 1..20: mol_type = other RNA
cggaataaaaaccacactgg

SEQ ID NO: 5387 - RNA, 20 nt, synthetic construct
  source 1..20: mol_type = other RNA
gacgtcttaacctagcccta

SEQ ID NO: 5388 - RNA, 20 nt, synthetic construct
  source 1..20: mol_type = other RNA
taaactatttttacaatttt

SEQ ID NO: 5389 - RNA, 20 nt, synthetic construct
  source 1..20: mol_type = other RNA
aagtagttttataaaagtag

SEQ ID NO: 5390 - RNA, 20 nt, synthetic construct
  source 1..20: mol_type = other RNA
ccgaaaagatacccaataaa

SEQ ID NO: 5391 - RNA, 20 nt, synthetic construct
  source 1..20: mol_type = other RNA
tttcggagatagtctacttt

SEQ ID NO: 5392 - RNA, 20 nt, synthetic construct
  source 1..20: mol_type = other RNA
gcgcctccattgttacatag

SEQ ID NO: 5393 - RNA, 20 nt, synthetic construct
  source 1..20: mol_type = other RNA
ctcccctttctcttctgata

SEQ ID NO: 5394 - RNA, 20 nt, synthetic construct
  source 1..20: mol_type = other RNA
gaagagaaaggggagagata

SEQ ID NO: 5395 - RNA, 20 nt, synthetic construct
  source 1..20: mol_type = other RNA
gtcattggatttagggacca

SEQ ID NO: 5396 - RNA, 20 nt, synthetic construct
  source 1..20: mol_type = other RNA
aatgactgatatcagaagag

SEQ ID NO: 5397 - RNA, 20 nt, synthetic construct
  source 1..20: mol_type = other RNA
taaacccaggataatctcct

SEQ ID NO: 5398 - RNA, 20 nt, synthetic construct
  source 1..20: mol_type = other RNA
tgggtttaggatggtcccta

SEQ ID NO: 5399 - RNA, 20 nt, synthetic construct
  source 1..20: mol_type = other RNA
cctcatgagatccttaggtc

SEQ ID NO: 5400 - RNA, 20 nt, synthetic construct
  source 1..20: mol_type = other RNA
catgaggagattatcctggg

SEQ ID NO: 5401 - RNA, 20 nt, synthetic construct
  source 1..20: mol_type = other RNA
ttaggtcaattacatctgca

SEQ ID NO: 5402 - RNA, 20 nt, synthetic construct
  source 1..20: mol_type = other RNA
gcaaagatctcatttccaaa

SEQ ID NO: 5403 - RNA, 20 nt, synthetic construct
  source 1..20: mol_type = other RNA
ttgcagatgtaattgaccta

SEQ ID NO: 5404 - RNA, 20 nt, synthetic construct
  source 1..20: mol_type = other RNA
catttccaaataaggtcaca

SEQ ID NO: 5405 - RNA, 20 nt, synthetic construct
  source 1..20: mol_type = other RNA
ttttgggggacacgattcaa

SEQ ID NO: 5406 - RNA, 20 nt, synthetic construct
  source 1..20: mol_type = other RNA
tgtcccccaaaaagataagt

SEQ ID NO: 5407 - RNA, 20 nt, synthetic construct
  source 1..20: mol_type = other RNA
tcctcccactcctgaaccac

SEQ ID NO: 5408 - RNA, 20 nt, synthetic construct
  source 1..20: mol_type = other RNA
tttcaaactattcacgtttt

SEQ ID NO: 5409 - RNA, 20 nt, synthetic construct
  source 1..20: mol_type = other RNA
ttttgtgtgaatgttcaatt

SEQ ID NO: 5410 - RNA, 20 nt, synthetic construct
  source 1..20: mol_type = other RNA
actcattcagtctatgaggg

SEQ ID NO: 5411 - RNA, 20 nt, synthetic construct
  source 1..20: mol_type = other RNA
tcaaggcttcctccctctaa

SEQ ID NO: 5412 - RNA, 20 nt, synthetic construct
  source 1..20: mol_type = other RNA
ctaaatgcctcttcctgagt

SEQ ID NO: 5413 - RNA, 20 nt, synthetic construct
  source 1..20: mol_type = other RNA
cctctcctcctcttatccct

SEQ ID NO: 5414 - RNA, 20 nt, synthetic construct
  source 1..20: mol_type = other RNA
cctacctccactatctcctc

SEQ ID NO: 5415 - RNA, 20 nt, synthetic construct
  source 1..20: mol_type = other RNA
ctgcggaggccagattgggg

SEQ ID NO: 5416 - RNA, 20 nt, synthetic construct
  source 1..20: mol_type = other RNA
ggcctccgcagggatcacct

SEQ ID NO: 5417 - RNA, 20 nt, synthetic construct
  source 1..20: mol_type = other RNA
tcttatactcagctgacact

SEQ ID NO: 5418 - RNA, 20 nt, synthetic construct
  source 1..20: mol_type = other RNA
ttttcccctcctgccttcct

SEQ ID NO: 5419 - RNA, 20 nt, synthetic construct
  source 1..20: mol_type = other RNA
gggtaagtcagaagcctctt

SEQ ID NO: 5420 - RNA, 20 nt, synthetic construct
  source 1..20: mol_type = other RNA
ctcaccaattacccctccca

SEQ ID NO: 5421 - RNA, 20 nt, synthetic construct
  source 1..20: mol_type = other RNA
tccactgcactcttatgagg

SEQ ID NO: 5422 - RNA, 20 nt, synthetic construct
  source 1..20: mol_type = other RNA
catatcctccactgcactct

SEQ ID NO: 5423 - RNA, 20 nt, synthetic construct
  source 1..20: mol_type = other RNA
gtcgcagagcccagggtgct

SEQ ID NO: 5424 - RNA, 20 nt, synthetic construct
  source 1..20: mol_type = other RNA
atgtccctctgtgcacaggc

SEQ ID NO: 5425 - RNA, 20 nt, synthetic construct
  source 1..20: mol_type = other RNA
ttctctgggtgcacggtaac

SEQ ID NO: 5426 - RNA, 20 nt, synthetic construct
  source 1..20: mol_type = other RNA
attcttgctccaggggaggc

SEQ ID NO: 5427 - RNA, 20 nt, synthetic construct
  source 1..20: mol_type = other RNA
aaggcctcccctggagcaag

SEQ ID NO: 5428 - RNA, 20 nt, synthetic construct
  source 1..20: mol_type = other RNA
cagcacagagtaggagctca

SEQ ID NO: 5429 - RNA, 20 nt, synthetic construct
  source 1..20: mol_type = other RNA
agcccgccatcgcagcacag

SEQ ID NO: 5430 - RNA, 20 nt, synthetic construct
  source 1..20: mol_type = other RNA
ccatcgagcccgccatcgca

SEQ ID NO: 5431 - RNA, 20 nt, synthetic construct
  source 1..20: mol_type = other RNA
actttggactccagcaccta

SEQ ID NO: 5432 - RNA, 20 nt, synthetic construct
  source 1..20: mol_type = other RNA
aggtgctggagtccaaagtt

SEQ ID NO: 5433 - RNA, 20 nt, synthetic construct
  source 1..20: mol_type = other RNA
gctgtgcatctgcaagggag

SEQ ID NO: 5434 - RNA, 20 nt, synthetic construct
  source 1..20: mol_type = other RNA
gcaagggaggatcataaatt

SEQ ID NO: 5435 - RNA, 20 nt, synthetic construct
  source 1..20: mol_type = other RNA
tcccttgcagatgcacagca

SEQ ID NO: 5436 - RNA, 20 nt, synthetic construct
  source 1..20: mol_type = other RNA
taaattcgcctttgtttctt

SEQ ID NO: 5437 - RNA, 20 nt, synthetic construct
  source 1..20: mol_type = other RNA
acagcccttccagaaagagc

SEQ ID NO: 5438 - RNA, 20 nt, synthetic construct
  source 1..20: mol_type = other RNA
gaggccaggagctctctttc

SEQ ID NO: 5439 - RNA, 20 nt, synthetic construct
  source 1..20: mol_type = other RNA
tcctgcctggtacacaatag

SEQ ID NO: 5440 - RNA, 20 nt, synthetic construct
  source 1..20: mol_type = other RNA
agtaaacacctattgtgtac

SEQ ID NO: 5441 - RNA, 20 nt, synthetic construct
  source 1..20: mol_type = other RNA
actggacaagcatccagtaa

SEQ ID NO: 5442 - RNA, 20 nt, synthetic construct
  source 1..20: mol_type = other RNA
ttgcaaattgaatcttctgg

SEQ ID NO: 5443 - RNA, 20 nt, synthetic construct
  source 1..20: mol_type = other RNA
tctggaaagctgagcttgtg

SEQ ID NO: 5444 - RNA, 20 nt, synthetic construct
  source 1..20: mol_type = other RNA
ttgtagtataaatcccttga

SEQ ID NO: 5445 - RNA, 20 nt, synthetic construct
  source 1..20: mol_type = other RNA
cttgaaatgcatgtaggctg

SEQ ID NO: 5446 - RNA, 20 nt, synthetic construct
  source 1..20: mol_type = other RNA
aaagcaagcaatctcttcaa

SEQ ID NO: 5447 - RNA, 20 nt, synthetic construct
  source 1..20: mol_type = other RNA
cttcaaggagcagctagttg

SEQ ID NO: 5448 - RNA, 20 nt, synthetic construct
  source 1..20: mol_type = other RNA
tactgtggactcctcgctgc

SEQ ID NO: 5449 - RNA, 20 nt, synthetic construct
  source 1..20: mol_type = other RNA
atcctactgtggactcctcg

SEQ ID NO: 5450 - RNA, 20 nt, synthetic construct
  source 1..20: mol_type = other RNA
cacgcagggtgagaggcggg

SEQ ID NO: 5451 - RNA, 20 nt, synthetic construct
  source 1..20: mol_type = other RNA
taactgggctggaaggcagg

SEQ ID NO: 5452 - RNA, 20 nt, synthetic construct
  source 1..20: mol_type = other RNA
gacgctgtttggggagggcg

SEQ ID NO: 5453 - RNA, 20 nt, synthetic construct
  source 1..20: mol_type = other RNA
ggtttcggcctcgccctccc

SEQ ID NO: 5454 - RNA, 20 nt, synthetic construct
  source 1..20: mol_type = other RNA
tccagtccgggggttccgtt

SEQ ID NO: 5455 - RNA, 20 nt, synthetic construct
  source 1..20: mol_type = other RNA
gataggatcgtccgatgggg

SEQ ID NO: 5456 - RNA, 20 nt, synthetic construct
  source 1..20: mol_type = other RNA
gattaaacattaacggaacc

SEQ ID NO: 5457 - RNA, 20 nt, synthetic construct
  source 1..20: mol_type = other RNA
tatctgattaaacattaacg

SEQ ID NO: 5458 - RNA, 20 nt, synthetic construct
  source 1..20: mol_type = other RNA
tccgatggggctctggtggc

SEQ ID NO: 5459 - RNA, 20 nt, synthetic construct
  source 1..20: mol_type = other RNA
gacgatcctatctgattaaa

SEQ ID NO: 5460 - RNA, 20 nt, synthetic construct
  source 1..20: mol_type = other RNA
cgccaccagagccccatcgg

SEQ ID NO: 5461 - RNA, 20 nt, synthetic construct
  source 1..20: mol_type = other RNA
gcgcgccccaggcgtcaagc

SEQ ID NO: 5462 - RNA, 20 nt, synthetic construct
  source 1..20: mol_type = other RNA
tggctgggagctgggagccg

SEQ ID NO: 5463 - RNA, 20 nt, synthetic construct
  source 1..20: mol_type = other RNA
ctacacccgcaccttggcgc

SEQ ID NO: 5464 - RNA, 20 nt, synthetic construct
  source 1..20: mol_type = other RNA
tgccaagcgaagagccctcg

SEQ ID NO: 5465 - RNA, 20 nt, synthetic construct
  source 1..20: mol_type = other RNA
tggggactgcaggcaaggcg

SEQ ID NO: 5466 - RNA, 20 nt, synthetic construct
  source 1..20: mol_type = other RNA
tggcagtgctctgctcgccc

SEQ ID NO: 5467 - RNA, 20 nt, synthetic construct
  source 1..20: mol_type = other RNA
tgcccagatttcccagtttc

SEQ ID NO: 5468 - RNA, 20 nt, synthetic construct
  source 1..20: mol_type = other RNA
gggcaggatatcctggcagt

SEQ ID NO: 5469 - RNA, 20 nt, synthetic construct
  source 1..20: mol_type = other RNA
gaacccactataatggcaag

SEQ ID NO: 5470 - RNA, 20 nt, synthetic construct
  source 1..20: mol_type = other RNA
gccgtccttcccaccccgcc

SEQ ID NO: 5471 - RNA, 20 nt, synthetic construct
  source 1..20: mol_type = other RNA
gtttcagccgaagaaaagaa

SEQ ID NO: 5472 - RNA, 20 nt, synthetic construct
  source 1..20: mol_type = other RNA
gactccaagctgggggacac

SEQ ID NO: 5473 - RNA, 20 nt, synthetic construct
  source 1..20: mol_type = other RNA
tggcttcctctcactagctg

SEQ ID NO: 5474 - RNA, 20 nt, synthetic construct
  source 1..20: mol_type = other RNA
ttgagcctccattgcctaat

SEQ ID NO: 5475 - RNA, 20 nt, synthetic construct
  source 1..20: mol_type = other RNA
ttaaaagggaggtgacaatc

SEQ ID NO: 5476 - RNA, 20 nt, synthetic construct
  source 1..20: mol_type = other RNA
tccctacggctcagtggcag

SEQ ID NO: 5477 - RNA, 20 nt, synthetic construct
  source 1..20: mol_type = other RNA
gctgccactgagccgtaggg

SEQ ID NO: 5478 - RNA, 20 nt, synthetic construct
  source 1..20: mol_type = other RNA
ccccatctgctgccactgag

SEQ ID NO: 5479 - RNA, 20 nt, synthetic construct
  source 1..20: mol_type = other RNA
ccccggggcttgcattgtaa

SEQ ID NO: 5480 - RNA, 20 nt, synthetic construct
  source 1..20: mol_type = other RNA
cttgcagttttgtccctgtc

SEQ ID NO: 5481 - RNA, 20 nt, synthetic construct
  source 1..20: mol_type = other RNA
tgccacccagcacactcaga

SEQ ID NO: 5482 - RNA, 20 nt, synthetic construct
  source 1..20: mol_type = other RNA
ctcgagaaagtcaaaggctc

SEQ ID NO: 5483 - RNA, 20 nt, synthetic construct
  source 1..20: mol_type = other RNA
tggccacaaccccacaacat

SEQ ID NO: 5484 - RNA, 20 nt, synthetic construct
  source 1..20: mol_type = other RNA
tgagaggtgagtaagcagag

SEQ ID NO: 5485 - RNA, 20 nt, synthetic construct
  source 1..20: mol_type = other RNA
tcaagggcttggttcaggtg

SEQ ID NO: 5486 - RNA, 20 nt, synthetic construct
  source 1..20: mol_type = other RNA
aatttagaatgaaaatattt

SEQ ID NO: 5487 - RNA, 20 nt, synthetic construct
  source 1..20: mol_type = other RNA
ttttcttttagtcatgagaa

SEQ ID NO: 5488 - RNA, 20 nt, synthetic construct
  source 1..20: mol_type = other RNA
gaaaatgccttccgctaaat

SEQ ID NO: 5489 - RNA, 20 nt, synthetic construct
  source 1..20: mol_type = other RNA
ctgaactcctactaatgctt

SEQ ID NO: 5490 - RNA, 20 nt, synthetic construct
  source 1..20: mol_type = other RNA
tcgctgaactcctactaatg

SEQ ID NO: 5491 - RNA, 20 nt, synthetic construct
  source 1..20: mol_type = other RNA
tagaataaaattctcatgac

SEQ ID NO: 5492 - RNA, 20 nt, synthetic construct
  source 1..20: mol_type = other RNA
ttgttcatggtacctcctaa

SEQ ID NO: 5493 - RNA, 20 nt, synthetic construct
  source 1..20: mol_type = other RNA
tccacctctggttttcccag

SEQ ID NO: 5494 - RNA, 20 nt, synthetic construct
  source 1..20: mol_type = other RNA
caaaaaaaaaagaaaaagaa

SEQ ID NO: 5495 - RNA, 20 nt, synthetic construct
  source 1..20: mol_type = other RNA
gtctcccgggttcaagtggt

SEQ ID NO: 5496 - RNA, 20 nt, synthetic construct
  source 1..20: mol_type = other RNA
cagcttcttgggaggctgag

SEQ ID NO: 5497 - RNA, 20 nt, synthetic construct
  source 1..20: mol_type = other RNA
actgaggaggtcaggagttt

SEQ ID NO: 5498 - RNA, 20 nt, synthetic construct
  source 1..20: mol_type = other RNA
gaggaggtgatcctcccgcc

SEQ ID NO: 5499 - RNA, 20 nt, synthetic construct
  source 1..20: mol_type = other RNA
cctcctcggatccactgagg

SEQ ID NO: 5500 - RNA, 20 nt, synthetic construct
  source 1..20: mol_type = other RNA
tcccgcctcagcctcccaaa

SEQ ID NO: 5501 - RNA, 20 nt, synthetic construct
  source 1..20: mol_type = other RNA
accgtctgaaatgtaaaatg

SEQ ID NO: 5502 - RNA, 20 nt, synthetic construct
  source 1..20: mol_type = other RNA
caaaaaaaacttttggtttt

SEQ ID NO: 5503 - RNA, 20 nt, synthetic construct
  source 1..20: mol_type = other RNA
aataaatcacaaaaaaaact

SEQ ID NO: 5504 - RNA, 20 nt, synthetic construct
  source 1..20: mol_type = other RNA
catgtcagttcacgtcaggt

SEQ ID NO: 5505 - RNA, 20 nt, synthetic construct
  source 1..20: mol_type = other RNA
atgcagcaaaatatatgaat

SEQ ID NO: 5506 - RNA, 20 nt, synthetic construct
  source 1..20: mol_type = other RNA
ggagctgcatactgtaatct

SEQ ID NO: 5507 - RNA, 20 nt, synthetic construct
  source 1..20: mol_type = other RNA
gagtctgcttggaagaatct

SEQ ID NO: 5508 - RNA, 20 nt, synthetic construct
  source 1..20: mol_type = other RNA
aaacaagttctgaggttcaa

SEQ ID NO: 5509 - RNA, 20 nt, synthetic construct
  source 1..20: mol_type = other RNA
tggactccagtcagagtaga

SEQ ID NO: 5510 - RNA, 20 nt, synthetic construct
  source 1..20: mol_type = other RNA
ctgtatatatgcatcttgga

SEQ ID NO: 5511 - RNA, 20 nt, synthetic construct
  source 1..20: mol_type = other RNA
cccatatctctgtatatatg

SEQ ID NO: 5512 - RNA, 20 nt, synthetic construct
  source 1..20: mol_type = other RNA
agtccaaactccatgctcct

SEQ ID NO: 5513 - RNA, 20 nt, synthetic construct
  source 1..20: mol_type = other RNA
ccatagatagtggctgctat

SEQ ID NO: 5514 - RNA, 20 nt, synthetic construct
  source 1..20: mol_type = other RNA
atggtgatttgtttggtttt

SEQ ID NO: 5515 - RNA, 20 nt, synthetic construct
  source 1..20: mol_type = other RNA
catgtggaaatttggtcctc

SEQ ID NO: 5516 - RNA, 20 nt, synthetic construct
  source 1..20: mol_type = other RNA
caaggacggcaccaagcctt

SEQ ID NO: 5517 - RNA, 20 nt, synthetic construct
  source 1..20: mol_type = other RNA
tagcgggagaacttactcat

SEQ ID NO: 5518 - RNA, 20 nt, synthetic construct
  source 1..20: mol_type = other RNA
gccttcaagggaaatcatag

SEQ ID NO: 5519 - RNA, 20 nt, synthetic construct
  source 1..20: mol_type = other RNA
catggcaagagaagaagcaa

SEQ ID NO: 5520 - RNA, 20 nt, synthetic construct
  source 1..20: mol_type = other RNA
atcacatggcaagagaagaa

SEQ ID NO: 5521 - RNA, 20 nt, synthetic construct
  source 1..20: mol_type = other RNA
ctgcacatgtaggctcccct

SEQ ID NO: 5522 - RNA, 20 nt, synthetic construct
  source 1..20: mol_type = other RNA
gtgaaagcagcttaaggccc

SEQ ID NO: 5523 - RNA, 20 nt, synthetic construct
  source 1..20: mol_type = other RNA
gcttctggtgagggccttaa

SEQ ID NO: 5524 - RNA, 20 nt, synthetic construct
  source 1..20: mol_type = other RNA
tgagctgaataaatcccttt

SEQ ID NO: 5525 - RNA, 20 nt, synthetic construct
  source 1..20: mol_type = other RNA
cttttccttgtaaattactc

SEQ ID NO: 5526 - RNA, 20 nt, synthetic construct
  source 1..20: mol_type = other RNA
cttctgcctgcatttgtaga

SEQ ID NO: 5527 - RNA, 20 nt, synthetic construct
  source 1..20: mol_type = other RNA
ggatgggagatttatataac

SEQ ID NO: 5528 - RNA, 20 nt, synthetic construct
  source 1..20: mol_type = other RNA
agatgctctacaaatgcagg

SEQ ID NO: 5529 - RNA, 20 nt, synthetic construct
  source 1..20: mol_type = other RNA
cccatccagatgctctacaa

SEQ ID NO: 5530 - RNA, 20 nt, synthetic construct
  source 1..20: mol_type = other RNA
gaggctccgagaggttgagt

SEQ ID NO: 5531 - RNA, 20 nt, synthetic construct
  source 1..20: mol_type = other RNA
tgggctttggagccaggaaa

SEQ ID NO: 5532 - RNA, 20 nt, synthetic construct
  source 1..20: mol_type = other RNA
tctactatactctgttgtgt

SEQ ID NO: 5533 - RNA, 20 nt, synthetic construct
  source 1..20: mol_type = other RNA
actatactctgttgtgtctc

SEQ ID NO: 5534 - RNA, 20 nt, synthetic construct
  source 1..20: mol_type = other RNA
cacccctacttacaaattac

SEQ ID NO: 5535 - RNA, 20 nt, synthetic construct
  source 1..20: mol_type = other RNA
tgttcctccttgcatggggc

SEQ ID NO: 5536 - RNA, 20 nt, synthetic construct
  source 1..20: mol_type = other RNA
tggccccatgcaaggaggaa

SEQ ID NO: 5537 - RNA, 20 nt, synthetic construct
  source 1..20: mol_type = other RNA
gtggaggttgcctggcacct

SEQ ID NO: 5538 - RNA, 20 nt, synthetic construct
  source 1..20: mol_type = other RNA
ccggcgggcagcctgggcct

SEQ ID NO: 5539 - RNA, 20 nt, synthetic construct
  source 1..20: mol_type = other RNA
tggtgaggtatccccggcgg

SEQ ID NO: 5540 - RNA, 20 nt, synthetic construct
  source 1..20: mol_type = other RNA
tgcatgtcttccatggcctt

SEQ ID NO: 5541 - RNA, 20 nt, synthetic construct
  source 1..20: mol_type = other RNA
tcaccaggaagccaggaaga

SEQ ID NO: 5542 - RNA, 20 nt, synthetic construct
  source 1..20: mol_type = other RNA
ggaagtgccattcccaaaaa

SEQ ID NO: 5543 - RNA, 20 nt, synthetic construct
  source 1..20: mol_type = other RNA
gaaggggacagcaagtatgt

SEQ ID NO: 5544 - RNA, 20 nt, synthetic construct
  source 1..20: mol_type = other RNA
ggtaccaagcacagtaacta

SEQ ID NO: 5545 - RNA, 20 nt, synthetic construct
  source 1..20: mol_type = other RNA
tcatttgaaagacgaggaga

SEQ ID NO: 5546 - RNA, 20 nt, synthetic construct
  source 1..20: mol_type = other RNA
aggctctacccctagctgtc

SEQ ID NO: 5547 - RNA, 20 nt, synthetic construct
  source 1..20: mol_type = other RNA
aacccattggtctgcctgcc

SEQ ID NO: 5548 - RNA, 20 nt, synthetic construct
  source 1..20: mol_type = other RNA
gctgcctacggaaacctgta

SEQ ID NO: 5549 - RNA, 20 nt, synthetic construct
  source 1..20: mol_type = other RNA
cagggccttgtccctacagg

SEQ ID NO: 5550 - RNA, 20 nt, synthetic construct
  source 1..20: mol_type = other RNA
agagtgaagtcccttcttta

SEQ ID NO: 5551 - RNA, 20 nt, synthetic construct
  source 1..20: mol_type = other RNA
aggagggaggagggccaccc

SEQ ID NO: 5552 - RNA, 20 nt, synthetic construct
  source 1..20: mol_type = other RNA
tcggtggaggggcagaaagg

SEQ ID NO: 5553 - RNA, 20 nt, synthetic construct
  source 1..20: mol_type = other RNA
taaaaaaacgtttttatttg

SEQ ID NO: 5554 - RNA, 20 nt, synthetic construct
  source 1..20: mol_type = other RNA
agttagaggccaggaaacga

SEQ ID NO: 5555 - RNA, 20 nt, synthetic construct
  source 1..20: mol_type = other RNA
gtgtgaaaatgacacacgct

SEQ ID NO: 5556 - RNA, 20 nt, synthetic construct
  source 1..20: mol_type = other RNA
gctcagcataccgtggctga

SEQ ID NO: 5557 - RNA, 20 nt, synthetic construct
  source 1..20: mol_type = other RNA
ctgtcatggcgccacaggcc

SEQ ID NO: 5558 - RNA, 20 nt, synthetic construct
  source 1..20: mol_type = other RNA
gtctgctcaacacacgttta

SEQ ID NO: 5559 - RNA, 20 nt, synthetic construct
  source 1..20: mol_type = other RNA
tcgcctctgcagcacacagt

SEQ ID NO: 5560 - RNA, 20 nt, synthetic construct
  source 1..20: mol_type = other RNA
ggtgctatacgggtaccttc

SEQ ID NO: 5561 - RNA, 20 nt, synthetic construct
  source 1..20: mol_type = other RNA
agagctggacttcaaactgg

SEQ ID NO: 5562 - RNA, 20 nt, synthetic construct
  source 1..20: mol_type = other RNA
taccagcctgggttcgagtc

SEQ ID NO: 5563 - RNA, 20 nt, synthetic construct
  source 1..20: mol_type = other RNA
cttcacctctctgagcctca

SEQ ID NO: 5564 - RNA, 20 nt, synthetic construct
  source 1..20: mol_type = other RNA
gtaaaccagttataataatt

SEQ ID NO: 5565 - RNA, 20 nt, synthetic construct
  source 1..20: mol_type = other RNA
gctgaatgcttcacgacctc

SEQ ID NO: 5566 - RNA, 20 nt, synthetic construct
  source 1..20: mol_type = other RNA
ccagaggcttcttaacctgc

SEQ ID NO: 5567 - RNA, 20 nt, synthetic construct
  source 1..20: mol_type = other RNA
agggactagttgtggcagga

SEQ ID NO: 5568 - RNA, 20 nt, synthetic construct
  source 1..20: mol_type = other RNA
cccgagggttcaccgctgcc

SEQ ID NO: 5569 - RNA, 20 nt, synthetic construct
  source 1..20: mol_type = other RNA
gccccactccctccctacct

SEQ ID NO: 5570 - RNA, 20 nt, synthetic construct
  source 1..20: mol_type = other RNA
gcacctctgcctcccgggtt

SEQ ID NO: 5571 - RNA, 20 nt, synthetic construct
  source 1..20: mol_type = other RNA
cttgaacccgggaggcagag

SEQ ID NO: 5572 - RNA, 20 nt, synthetic construct
  source 1..20: mol_type = other RNA
ctattaaaaatacaaaaatt

SEQ ID NO: 5573 - RNA, 20 nt, synthetic construct
  source 1..20: mol_type = other RNA
cctgaggtcgagagttcgag

SEQ ID NO: 5574 - RNA, 20 nt, synthetic construct
  source 1..20: mol_type = other RNA
cccacctcggcctcccaaag

SEQ ID NO: 5575 - RNA, 20 nt, synthetic construct
  source 1..20: mol_type = other RNA
cagcactttgggaggccgag

SEQ ID NO: 5576 - RNA, 20 nt, synthetic construct
  source 1..20: mol_type = other RNA
gcagctgggagcggtgactc

SEQ ID NO: 5577 - RNA, 20 nt, synthetic construct
  source 1..20: mol_type = other RNA
tgacataacagcactggcaa

SEQ ID NO: 5578 - RNA, 20 nt, synthetic construct
  source 1..20: mol_type = other RNA
tgcccagagccttggcacag

SEQ ID NO: 5579 - RNA, 20 nt, synthetic construct
  source 1..20: mol_type = other RNA
tgtctgggagccaggctgtg

SEQ ID NO: 5580 - RNA, 20 nt, synthetic construct
  source 1..20: mol_type = other RNA
ttcctaaaaggaatcctcta

SEQ ID NO: 5581 - RNA, 20 nt, synthetic construct
  source 1..20: mol_type = other RNA
tctatgccagaccgtgttgc

SEQ ID NO: 5582 - RNA, 20 nt, synthetic construct
  source 1..20: mol_type = other RNA
ctgcaacacggtctggcata

SEQ ID NO: 5583 - RNA, 20 nt, synthetic construct
  source 1..20: mol_type = other RNA
ggctgggagcccagcactcc

SEQ ID NO: 5584 - RNA, 20 nt, synthetic construct
  source 1..20: mol_type = other RNA
aggagcgagaaaactcaggc

SEQ ID NO: 5585 - RNA, 20 nt, synthetic construct
  source 1..20: mol_type = other RNA
cagcccagcagcctcccacc

SEQ ID NO: 5586 - RNA, 20 nt, synthetic construct
  source 1..20: mol_type = other RNA
aacctgtccccacatcccag

SEQ ID NO: 5587 - RNA, 20 nt, synthetic construct
  source 1..20: mol_type = other RNA
ggtaaggccaggctgtggct

SEQ ID NO: 5588 - RNA, 20 nt, synthetic construct
  source 1..20: mol_type = other RNA
aggaggactcctctgtcttt

SEQ ID NO: 5589 - RNA, 20 nt, synthetic construct
  source 1..20: mol_type = other RNA
cgtggaacctggagcggatt

SEQ ID NO: 5590 - RNA, 20 nt, synthetic construct
  source 1..20: mol_type = other RNA
gctccaggttccacgggatg

SEQ ID NO: 5591 - RNA, 20 nt, synthetic construct
  source 1..20: mol_type = other RNA
gcccggtaccgtggaggggt

SEQ ID NO: 5592 - RNA, 20 nt, synthetic construct
  source 1..20: mol_type = other RNA
gtgccctgccccaccccatc

SEQ ID NO: 5593 - RNA, 20 nt, synthetic construct
  source 1..20: mol_type = other RNA
gagctgaatccatttgctct

SEQ ID NO: 5594 - RNA, 20 nt, synthetic construct
  source 1..20: mol_type = other RNA
atttgctctgccctggcctg

SEQ ID NO: 5595 - RNA, 20 nt, synthetic construct
  source 1..20: mol_type = other RNA
ccatcccctgcagcccccac

SEQ ID NO: 5596 - RNA, 20 nt, synthetic construct
  source 1..20: mol_type = other RNA
cctgcagcccccactgcctg

SEQ ID NO: 5597 - RNA, 20 nt, synthetic construct
  source 1..20: mol_type = other RNA
tttaaggcaagacttttgca

SEQ ID NO: 5598 - RNA, 20 nt, synthetic construct
  source 1..20: mol_type = other RNA
tcttttccttcttttctctt

SEQ ID NO: 5599 - RNA, 20 nt, synthetic construct
  source 1..20: mol_type = other RNA
gatggtgactctacctaggg

SEQ ID NO: 5600 - RNA, 20 nt, synthetic construct
  source 1..20: mol_type = other RNA
gatgaaccctccttccaagg

SEQ ID NO: 5601 - RNA, 20 nt, synthetic construct
  source 1..20: mol_type = other RNA
ggtccagtctgcagggcact

SEQ ID NO: 5602 - RNA, 20 nt, synthetic construct
  source 1..20: mol_type = other RNA
tttaatgggatagacacaac

SEQ ID NO: 5603 - RNA, 20 nt, synthetic construct
  source 1..20: mol_type = other RNA
cattaaaggatctggtccag

SEQ ID NO: 5604 - RNA, 20 nt, synthetic construct
  source 1..20: mol_type = other RNA
cagacagggttgtgtctatc

SEQ ID NO: 5605 - RNA, 20 nt, synthetic construct
  source 1..20: mol_type = other RNA
agagtcttccccgactgaat

SEQ ID NO: 5606 - RNA, 20 nt, synthetic construct
  source 1..20: mol_type = other RNA
ctgcgctgagctccagacct

SEQ ID NO: 5607 - RNA, 20 nt, synthetic construct
  source 1..20: mol_type = other RNA
tctctgcgctgagctccaga

SEQ ID NO: 5608 - RNA, 20 nt, synthetic construct
  source 1..20: mol_type = other RNA
cacgagaaccggtaaggggt

SEQ ID NO: 5609 - RNA, 20 nt, synthetic construct
  source 1..20: mol_type = other RNA
tgggaagccactttcttcta

SEQ ID NO: 5610 - RNA, 20 nt, synthetic construct
  source 1..20: mol_type = other RNA
ttcaactcattggagtctca

SEQ ID NO: 5611 - RNA, 20 nt, synthetic construct
  source 1..20: mol_type = other RNA
gcacatccttcaactcattg

SEQ ID NO: 5612 - RNA, 20 nt, synthetic construct
  source 1..20: mol_type = other RNA
gttgcaatggcagcaactca

SEQ ID NO: 5613 - RNA, 20 nt, synthetic construct
  source 1..20: mol_type = other RNA
gagctggtgggctgggtgtg

SEQ ID NO: 5614 - RNA, 20 nt, synthetic construct
  source 1..20: mol_type = other RNA
tctggcaagggtggcagcag

SEQ ID NO: 5615 - RNA, 20 nt, synthetic construct
  source 1..20: mol_type = other RNA
gtgcctcagggacctcccgg

SEQ ID NO: 5616 - RNA, 20 nt, synthetic construct
  source 1..20: mol_type = other RNA
gagaccaagagggacactgg

SEQ ID NO: 5617 - RNA, 20 nt, synthetic construct
  source 1..20: mol_type = other RNA
tctgccagtgtccctcttgg

SEQ ID NO: 5618 - RNA, 20 nt, synthetic construct
  source 1..20: mol_type = other RNA
cagagaccccagtccaggca

SEQ ID NO: 5619 - RNA, 20 nt, synthetic construct
  source 1..20: mol_type = other RNA
tctcagtccctgcctggact

SEQ ID NO: 5620 - RNA, 20 nt, synthetic construct
  source 1..20: mol_type = other RNA
tgccccctaagttagtttcc

SEQ ID NO: 5621 - RNA, 20 nt, synthetic construct
  source 1..20: mol_type = other RNA
acttgttccaaccgaggggg

SEQ ID NO: 5622 - RNA, 20 nt, synthetic construct
  source 1..20: mol_type = other RNA
gtgtcggcaggaccactttc

SEQ ID NO: 5623 - RNA, 20 nt, synthetic construct
  source 1..20: mol_type = other RNA
cagcctctgtcttcacacag

SEQ ID NO: 5624 - RNA, 20 nt, synthetic construct
  source 1..20: mol_type = other RNA
aatgacaagtgtccttatga

SEQ ID NO: 5625 - RNA, 20 nt, synthetic construct
  source 1..20: mol_type = other RNA
agtgggccctaaatccaatg

SEQ ID NO: 5626 - RNA, 20 nt, synthetic construct
  source 1..20: mol_type = other RNA
tccaggatgatctcatgtgg

SEQ ID NO: 5627 - RNA, 20 nt, synthetic construct
  source 1..20: mol_type = other RNA
tggaggatccagtgggccct

SEQ ID NO: 5628 - RNA, 20 nt, synthetic construct
  source 1..20: mol_type = other RNA
tcctggaggatccagtgggc

SEQ ID NO: 5629 - RNA, 20 nt, synthetic construct
  source 1..20: mol_type = other RNA
catgtggggaaccttaacca

SEQ ID NO: 5630 - RNA, 20 nt, synthetic construct
  source 1..20: mol_type = other RNA
gcaaggaccctttttccaaa

SEQ ID NO: 5631 - RNA, 20 nt, synthetic construct
  source 1..20: mol_type = other RNA
taacccccacaacctgtggc

SEQ ID NO: 5632 - RNA, 20 nt, synthetic construct
  source 1..20: mol_type = other RNA
ctttggcagccactgttccc

SEQ ID NO: 5633 - RNA, 20 nt, synthetic construct
  source 1..20: mol_type = other RNA
tatggggaagaaagggcccc

SEQ ID NO: 5634 - RNA, 20 nt, synthetic construct
  source 1..20: mol_type = other RNA
atgggcatcctatggggaag

SEQ ID NO: 5635 - RNA, 20 nt, synthetic construct
  source 1..20: mol_type = other RNA
agggcttggctggaggaagt

SEQ ID NO: 5636 - RNA, 20 nt, synthetic construct
  source 1..20: mol_type = other RNA
gagagggtgagtgacgtatg

SEQ ID NO: 5637 - RNA, 20 nt, synthetic construct
  source 1..20: mol_type = other RNA
tcaggttcctctgcaaaagg

SEQ ID NO: 5638 - RNA, 20 nt, synthetic construct
  source 1..20: mol_type = other RNA
ttacctcccttttgcagagg

SEQ ID NO: 5639 - RNA, 20 nt, synthetic construct
  source 1..20: mol_type = other RNA
gttattgctgtagcatgcat

SEQ ID NO: 5640 - RNA, 20 nt, synthetic construct
  source 1..20: mol_type = other RNA
cagcacctcactcaatacct

SEQ ID NO: 5641 - RNA, 20 nt, synthetic construct
  source 1..20: mol_type = other RNA
ccagcacctaatatggtgcc

SEQ ID NO: 5642 - RNA, 20 nt, synthetic construct
  source 1..20: mol_type = other RNA
agaagattaatccattcctt

SEQ ID NO: 5643 - RNA, 20 nt, synthetic construct
  source 1..20: mol_type = other RNA
tctggatacactgttggggg

SEQ ID NO: 5644 - RNA, 20 nt, synthetic construct
  source 1..20: mol_type = other RNA
attccttaaacaaatgctac

SEQ ID NO: 5645 - RNA, 20 nt, synthetic construct
  source 1..20: mol_type = other RNA
gtgtcaagtagcatttgttt

SEQ ID NO: 5646 - RNA, 20 nt, synthetic construct
  source 1..20: mol_type = other RNA
agaactaatctgtgtcaagt

SEQ ID NO: 5647 - RNA, 20 nt, synthetic construct
  source 1..20: mol_type = other RNA
agcagaaggatcaggaaagg

SEQ ID NO: 5648 - RNA, 20 nt, synthetic construct
  source 1..20: mol_type = other RNA
ttctgctggatacacaggct

SEQ ID NO: 5649 - RNA, 20 nt, synthetic construct
  source 1..20: mol_type = other RNA
ggaaaggattcctggaggaa

SEQ ID NO: 5650 - RNA, 20 nt, synthetic construct
  source 1..20: mol_type = other RNA
tttcctgatccttctgctgg

SEQ ID NO: 5651 - RNA, 20 nt, synthetic construct
  source 1..20: mol_type = other RNA
acgttcattccactgcttgg

SEQ ID NO: 5652 - RNA, 20 nt, synthetic construct
  source 1..20: mol_type = other RNA
gacctggaggccacccaggc

SEQ ID NO: 5653 - RNA, 20 nt, synthetic construct
  source 1..20: mol_type = other RNA
tccaaacccccgggtgaggc

SEQ ID NO: 5654 - RNA, 20 nt, synthetic construct
  source 1..20: mol_type = other RNA
gagctgggcccctttccagc

SEQ ID NO: 5655 - RNA, 20 nt, synthetic construct
  source 1..20: mol_type = other RNA
ttgggcttccttccagtgag

SEQ ID NO: 5656 - RNA, 20 nt, synthetic construct
  source 1..20: mol_type = other RNA
gccgctggggccacacccca

SEQ ID NO: 5657 - RNA, 20 nt, synthetic construct
  source 1..20: mol_type = other RNA
ctgggcctggggtgtggccc

SEQ ID NO: 5658 - RNA, 20 nt, synthetic construct
  source 1..20: mol_type = other RNA
tcttgcagcagaacccaggt

SEQ ID NO: 5659 - RNA, 20 nt, synthetic construct
  source 1..20: mol_type = other RNA
tgcagcagaacccaggtaca

SEQ ID NO: 5660 - RNA, 20 nt, synthetic construct
  source 1..20: mol_type = other RNA
gctccaggagctgtacctgg

SEQ ID NO: 5661 - RNA, 20 nt, synthetic construct
  source 1..20: mol_type = other RNA
agcagaaggcctgctgggca

SEQ ID NO: 5662 - RNA, 20 nt, synthetic construct
  source 1..20: mol_type = other RNA
agaagacagcacagaggctg

SEQ ID NO: 5663 - RNA, 20 nt, synthetic construct
  source 1..20: mol_type = other RNA
agttgtcccgtcagcctgga

SEQ ID NO: 5664 - RNA, 20 nt, synthetic construct
  source 1..20: mol_type = other RNA
cctgcagccagcccggggcc

SEQ ID NO: 5665 - RNA, 20 nt, synthetic construct
  source 1..20: mol_type = other RNA
ggcctctgcccaccttgctg

SEQ ID NO: 5666 - RNA, 20 nt, synthetic construct
  source 1..20: mol_type = other RNA
agtggttcctctagggtggc

SEQ ID NO: 5667 - RNA, 20 nt, synthetic construct
  source 1..20: mol_type = other RNA
ggagaccaaacagtgctcgc

SEQ ID NO: 5668 - RNA, 20 nt, synthetic construct
  source 1..20: mol_type = other RNA
accatgtgcccggtgctaca

SEQ ID NO: 5669 - RNA, 20 nt, synthetic construct
  source 1..20: mol_type = other RNA
ataggcatctaccatgtgcc

SEQ ID NO: 5670 - RNA, 20 nt, synthetic construct
  source 1..20: mol_type = other RNA
cacagcctgggaggagaggc

SEQ ID NO: 5671 - RNA, 20 nt, synthetic construct
  source 1..20: mol_type = other RNA
gtcccgtgggcactttggtt

SEQ ID NO: 5672 - RNA, 20 nt, synthetic construct
  source 1..20: mol_type = other RNA
gtggagcttcctgccgagac

SEQ ID NO: 5673 - RNA, 20 nt, synthetic construct
  source 1..20: mol_type = other RNA
tcccacccacccactatgct

SEQ ID NO: 5674 - RNA, 20 nt, synthetic construct
  source 1..20: mol_type = other RNA
cacatgaatttcaggcaagg

SEQ ID NO: 5675 - RNA, 20 nt, synthetic construct
  source 1..20: mol_type = other RNA
cagagcagccactgaattgc

SEQ ID NO: 5676 - RNA, 20 nt, synthetic construct
  source 1..20: mol_type = other RNA
gtgggggccactatttagcc

SEQ ID NO: 5677 - RNA, 20 nt, synthetic construct
  source 1..20: mol_type = other RNA
acaaagaccttttctccaaa

SEQ ID NO: 5678 - RNA, 20 nt, synthetic construct
  source 1..20: mol_type = other RNA
caagatggcatcatctggat

SEQ ID NO: 5679 - RNA, 20 nt, synthetic construct
  source 1..20: mol_type = other RNA
tgagatgcttaattacatct

SEQ ID NO: 5680 - RNA, 20 nt, synthetic construct
  source 1..20: mol_type = other RNA
tctggattatgcggtgggct

SEQ ID NO: 5681 - RNA, 20 nt, synthetic construct
  source 1..20: mol_type = other RNA
ggattatgcggtgggctgta

SEQ ID NO: 5682 - RNA, 20 nt, synthetic construct
  source 1..20: mol_type = other RNA
agatgatgccatcttgagat

SEQ ID NO: 5683 - RNA, 20 nt, synthetic construct
  source 1..20: mol_type = other RNA
caggacttacagcccaccgc

SEQ ID NO: 5684 - RNA, 20 nt, synthetic construct
  source 1..20: mol_type = other RNA
ccctctgcctttctctcata

SEQ ID NO: 5685 - RNA, 20 nt, synthetic construct
  source 1..20: mol_type = other RNA
ccacctctgtctccacgtgg

SEQ ID NO: 5686 - RNA, 20 nt, synthetic construct
  source 1..20: mol_type = other RNA
caggacaggtgagcaagtgt

SEQ ID NO: 5687 - RNA, 20 nt, synthetic construct
  source 1..20: mol_type = other RNA
ctactctgcagcatatttgg

SEQ ID NO: 5688 - RNA, 20 nt, synthetic construct
  source 1..20: mol_type = other RNA
tccaaatatgctgcagagta

SEQ ID NO: 5689 - RNA, 20 nt, synthetic construct
  source 1..20: mol_type = other RNA
ctgcgggggccacagaggtg

SEQ ID NO: 5690 - RNA, 20 nt, synthetic construct
  source 1..20: mol_type = other RNA
gaacagcacctctgtggccc

SEQ ID NO: 5691 - RNA, 20 nt, synthetic construct
  source 1..20: mol_type = other RNA
gagggcagccctctgggctg

SEQ ID NO: 5692 - RNA, 20 nt, synthetic construct
  source 1..20: mol_type = other RNA
agcaggctggacctgcctgg

SEQ ID NO: 5693 - RNA, 20 nt, synthetic construct
  source 1..20: mol_type = other RNA
gtgagctctccctactttct

SEQ ID NO: 5694 - RNA, 20 nt, synthetic construct
  source 1..20: mol_type = other RNA
aaactgatccagttagggat

SEQ ID NO: 5695 - RNA, 20 nt, synthetic construct
  source 1..20: mol_type = other RNA
gtttggattctccaagaagc

SEQ ID NO: 5696 - RNA, 20 nt, synthetic construct
  source 1..20: mol_type = other RNA
agttagggatgataaagtgt

SEQ ID NO: 5697 - RNA, 20 nt, synthetic construct
  source 1..20: mol_type = other RNA
ctaactggatcagtttggat

SEQ ID NO: 5698 - RNA, 20 nt, synthetic construct
  source 1..20: mol_type = other RNA
tccctaactggatcagtttg

SEQ ID NO: 5699 - RNA, 20 nt, synthetic construct
  source 1..20: mol_type = other RNA
tgtggagtggagaacgcttg

SEQ ID NO: 5700 - RNA, 20 nt, synthetic construct
  source 1..20: mol_type = other RNA
tgtccgagctgcagcttcct

SEQ ID NO: 5701 - RNA, 20 nt, synthetic construct
  source 1..20: mol_type = other RNA
ctgttattctcctttgagtc

SEQ ID NO: 5702 - RNA, 20 nt, synthetic construct
  source 1..20: mol_type = other RNA
tgttgtctttcttgcagact

SEQ ID NO: 5703 - RNA, 20 nt, synthetic construct
  source 1..20: mol_type = other RNA
aagtgtaaaataaagcccct

SEQ ID NO: 5704 - RNA, 20 nt, synthetic construct
  source 1..20: mol_type = other RNA
aacaataatatgaatgttca

SEQ ID NO: 5705 - RNA, 20 nt, synthetic construct
  source 1..20: mol_type = other RNA
atatctaacaataatatgaa

SEQ ID NO: 5706 - RNA, 20 nt, synthetic construct
  source 1..20: mol_type = other RNA
tgctccttcatatgaatatc

SEQ ID NO: 5707 - RNA, 20 nt, synthetic construct
  source 1..20: mol_type = other RNA
gctggcaatgctactgccaa

SEQ ID NO: 5708 - RNA, 20 nt, synthetic construct
  source 1..20: mol_type = other RNA
tattctataatgtatttcat

SEQ ID NO: 5709 - RNA, 20 nt, synthetic construct
  source 1..20: mol_type = other RNA
tcacacactacatcctattc

SEQ ID NO: 5710 - RNA, 20 nt, synthetic construct
  source 1..20: mol_type = other RNA
caggcactggtgaaagcgcc

SEQ ID NO: 5711 - RNA, 20 nt, synthetic construct
  source 1..20: mol_type = other RNA
cctagacaccagcatacaga

SEQ ID NO: 5712 - RNA, 20 nt, synthetic construct
  source 1..20: mol_type = other RNA
agggcagggtcatggtcacc

SEQ ID NO: 5713 - RNA, 20 nt, synthetic construct
  source 1..20: mol_type = other RNA
gacggccgtgcttacctgtc

SEQ ID NO: 5714 - RNA, 20 nt, synthetic construct
  source 1..20: mol_type = other RNA
ccatcctggaggtgggtggg

SEQ ID NO: 5715 - RNA, 20 nt, synthetic construct
  source 1..20: mol_type = other RNA
tggaggtgggtggggactgc

SEQ ID NO: 5716 - RNA, 20 nt, synthetic construct
  source 1..20: mol_type = other RNA
gttgtgggaagggcgttcat

SEQ ID NO: 5717 - RNA, 20 nt, synthetic construct
  source 1..20: mol_type = other RNA
atccagccacctgctgattt

SEQ ID NO: 5718 - RNA, 20 nt, synthetic construct
  source 1..20: mol_type = other RNA
agccacctgctgatttgtta

SEQ ID NO: 5719 - RNA, 20 nt, synthetic construct
  source 1..20: mol_type = other RNA
gcaggtggctggatggatga

SEQ ID NO: 5720 - RNA, 20 nt, synthetic construct
  source 1..20: mol_type = other RNA
cggccgctgaccacccctgc

SEQ ID NO: 5721 - RNA, 20 nt, synthetic construct
  source 1..20: mol_type = other RNA
cttacctatgagggtgccgc

SEQ ID NO: 5722 - RNA, 20 nt, synthetic construct
  source 1..20: mol_type = other RNA
ggacctggcctgggaggtgg

SEQ ID NO: 5723 - RNA, 20 nt, synthetic construct
  source 1..20: mol_type = other RNA
gcactcgtggccactgggaa

SEQ ID NO: 5724 - RNA, 20 nt, synthetic construct
  source 1..20: mol_type = other RNA
ggtgatgtctttatgtcttt

SEQ ID NO: 5725 - RNA, 20 nt, synthetic construct
  source 1..20: mol_type = other RNA
ccggattttaaaaggggagc

SEQ ID NO: 5726 - RNA, 20 nt, synthetic construct
  source 1..20: mol_type = other RNA
tcaatgtggagggactcgag

SEQ ID NO: 5727 - RNA, 20 nt, synthetic construct
  source 1..20: mol_type = other RNA
cctcgagtccctccacattg

SEQ ID NO: 5728 - RNA, 20 nt, synthetic construct
  source 1..20: mol_type = other RNA
aagcaaactttttctatctt

SEQ ID NO: 5729 - RNA, 20 nt, synthetic construct
  source 1..20: mol_type = other RNA
tctgcttgcatacctctgag

SEQ ID NO: 5730 - RNA, 20 nt, synthetic construct
  source 1..20: mol_type = other RNA
gcctggccagtgtgacctgc

SEQ ID NO: 5731 - RNA, 20 nt, synthetic construct
  source 1..20: mol_type = other RNA
aaacctgtactctgtaggaa

SEQ ID NO: 5732 - RNA, 20 nt, synthetic construct
  source 1..20: mol_type = other RNA
ataaccttctgccccatcag

SEQ ID NO: 5733 - RNA, 20 nt, synthetic construct
  source 1..20: mol_type = other RNA
ggtgaccccttgtgcctgtc

SEQ ID NO: 5734 - RNA, 20 nt, synthetic construct
  source 1..20: mol_type = other RNA
cctgcttacagaggaggaaa

SEQ ID NO: 5735 - RNA, 20 nt, synthetic construct
  source 1..20: mol_type = other RNA
ctgtgctcagactggacaca

SEQ ID NO: 5736 - RNA, 20 nt, synthetic construct
  source 1..20: mol_type = other RNA
cagcactttgggaggccgag

SEQ ID NO: 5737 - RNA, 20 nt, synthetic construct
  source 1..20: mol_type = other RNA
gcccacctcggcctcccaaa

SEQ ID NO: 5738 - RNA, 20 nt, synthetic construct
  source 1..20: mol_type = other RNA
cctgaggtcaggagttcgag

SEQ ID NO: 5739 - RNA, 20 nt, synthetic construct
  source 1..20: mol_type = other RNA
cagctacttgggaggctaag

SEQ ID NO: 5740 - RNA, 20 nt, synthetic construct
  source 1..20: mol_type = other RNA
cttgaacccaggaggtggag

SEQ ID NO: 5741 - RNA, 20 nt, synthetic construct
  source 1..20: mol_type = other RNA
cagctcactgcaacctccac

SEQ ID NO: 5742 - RNA, 20 nt, synthetic construct
  source 1..20: mol_type = other RNA
tgccactgcaatccagcctg

SEQ ID NO: 5743 - RNA, 20 nt, synthetic construct
  source 1..20: mol_type = other RNA
agcctgagtgatagagcgag

SEQ ID NO: 5744 - RNA, 20 nt, synthetic construct
  source 1..20: mol_type = other RNA
ctcaggctggattgcagtgg

SEQ ID NO: 5745 - RNA, 20 nt, synthetic construct
  source 1..20: mol_type = other RNA
cgctctatcactcaggctgg

SEQ ID NO: 5746 - RNA, 20 nt, synthetic construct
  source 1..20: mol_type = other RNA
caaaaataaataagtaaata

SEQ ID NO: 5747 - RNA, 20 nt, synthetic construct
  source 1..20: mol_type = other RNA
cacagccatgctcctcctag

SEQ ID NO: 5748 - RNA, 20 nt, synthetic construct
  source 1..20: mol_type = other RNA
ttggccacggctcctggaga

SEQ ID NO: 5749 - RNA, 20 nt, synthetic construct
  source 1..20: mol_type = other RNA
tagaggccaggatccagaag

SEQ ID NO: 5750 - RNA, 20 nt, synthetic construct
  source 1..20: mol_type = other RNA
tggcctctaagatgtctcca

SEQ ID NO: 5751 - RNA, 20 nt, synthetic construct
  source 1..20: mol_type = other RNA
agaaggctcccacacctcat

SEQ ID NO: 5752 - RNA, 20 nt, synthetic construct
  source 1..20: mol_type = other RNA
gggccagagctgcgttaggc

SEQ ID NO: 5753 - RNA, 20 nt, synthetic construct
  source 1..20: mol_type = other RNA
tagcactttgggagggcaag

SEQ ID NO: 5754 - RNA, 20 nt, synthetic construct
  source 1..20: mol_type = other RNA
tcccgccttgccctcccaaa

SEQ ID NO: 5755 - RNA, 20 nt, synthetic construct
  source 1..20: mol_type = other RNA
tgaggtcaggacatcgagac

SEQ ID NO: 5756 - RNA, 20 nt, synthetic construct
  source 1..20: mol_type = other RNA
agaccatccttgctaacacg

SEQ ID NO: 5757 - RNA, 20 nt, synthetic construct
  source 1..20: mol_type = other RNA
ttgctaacacggtgaagccc

SEQ ID NO: 5758 - RNA, 20 nt, synthetic construct
  source 1..20: mol_type = other RNA
cggctcactgcaagctccgc

SEQ ID NO: 5759 - RNA, 20 nt, synthetic construct
  source 1..20: mol_type = other RNA
tgggagcaactgtccctgtt

SEQ ID NO: 5760 - RNA, 20 nt, synthetic construct
  source 1..20: mol_type = other RNA
gagccaggcctcagagagtg

SEQ ID NO: 5761 - RNA, 20 nt, synthetic construct
  source 1..20: mol_type = other RNA
tcttggtgcctctctttcat

SEQ ID NO: 5762 - RNA, 20 nt, synthetic construct
  source 1..20: mol_type = other RNA
ctttccatgaaagagaggca

SEQ ID NO: 5763 - RNA, 20 nt, synthetic construct
  source 1..20: mol_type = other RNA
tcacaataaccttattatcc

SEQ ID NO: 5764 - RNA, 20 nt, synthetic construct
  source 1..20: mol_type = other RNA
cctgagttcgtatattcaga

SEQ ID NO: 5765 - RNA, 20 nt, synthetic construct
  source 1..20: mol_type = other RNA
aactagccaaccccgggccc

SEQ ID NO: 5766 - RNA, 20 nt, synthetic construct
  source 1..20: mol_type = other RNA
tccagtttgtattggtcaag

SEQ ID NO: 5767 - RNA, 20 nt, synthetic construct
  source 1..20: mol_type = other RNA
tactggttctgcttctctgc

SEQ ID NO: 5768 - RNA, 20 nt, synthetic construct
  source 1..20: mol_type = other RNA
gcagggcaggccaggcaggc

SEQ ID NO: 5769 - RNA, 20 nt, synthetic construct
  source 1..20: mol_type = other RNA
aattctgcaggaattgccag

SEQ ID NO: 5770 - RNA, 20 nt, synthetic construct
  source 1..20: mol_type = other RNA
gttgaaggccttaagagaac

SEQ ID NO: 5771 - RNA, 20 nt, synthetic construct
  source 1..20: mol_type = other RNA
gaagacggagtaaggcaggt

SEQ ID NO: 5772 - RNA, 20 nt, synthetic construct
  source 1..20: mol_type = other RNA
aaaaaatattttcgcagcag

SEQ ID NO: 5773 - RNA, 20 nt, synthetic construct
  source 1..20: mol_type = other RNA
ggccacaaagttgatcccca

SEQ ID NO: 5774 - RNA, 20 nt, synthetic construct
  source 1..20: mol_type = other RNA
actttgtggcctgatgtttg

SEQ ID NO: 5775 - RNA, 20 nt, synthetic construct
  source 1..20: mol_type = other RNA
ccaaaattaaccatcactct

SEQ ID NO: 5776 - RNA, 20 nt, synthetic construct
  source 1..20: mol_type = other RNA
ctctgtgcctgtaagggagg

SEQ ID NO: 5777 - RNA, 20 nt, synthetic construct
  source 1..20: mol_type = other RNA
tcccggaagttgccggcagc

SEQ ID NO: 5778 - RNA, 20 nt, synthetic construct
  source 1..20: mol_type = other RNA
tcgcagagtctgaatagcag

SEQ ID NO: 5779 - RNA, 20 nt, synthetic construct
  source 1..20: mol_type = other RNA
cagagtctgaatagcagtgg

SEQ ID NO: 5780 - RNA, 20 nt, synthetic construct
  source 1..20: mol_type = other RNA
ccatccccaggccctgcgtc

SEQ ID NO: 5781 - RNA, 20 nt, synthetic construct
  source 1..20: mol_type = other RNA
ccaggccctgcgtcctctgc

SEQ ID NO: 5782 - RNA, 20 nt, synthetic construct
  source 1..20: mol_type = other RNA
acagagtgtgccgcatgccc

SEQ ID NO: 5783 - RNA, 20 nt, synthetic construct
  source 1..20: mol_type = other RNA
aggggaaggaatcttgttcc

SEQ ID NO: 5784 - RNA, 20 nt, synthetic construct
  source 1..20: mol_type = other RNA
tgttccacttcaagtctgga

SEQ ID NO: 5785 - RNA, 20 nt, synthetic construct
  source 1..20: mol_type = other RNA
gctctgcaacccccaccccc

SEQ ID NO: 5786 - RNA, 20 nt, synthetic construct
  source 1..20: mol_type = other RNA
aggcttccctggcggccgaa

SEQ ID NO: 5787 - RNA, 20 nt, synthetic construct
  source 1..20: mol_type = other RNA
agcaaacaaagcccaacaca

SEQ ID NO: 5788 - RNA, 20 nt, synthetic construct
  source 1..20: mol_type = other RNA
ctgccttgtcctctcagttt

SEQ ID NO: 5789 - RNA, 20 nt, synthetic construct
  source 1..20: mol_type = other RNA
agtggttctaagtgccacgg

SEQ ID NO: 5790 - RNA, 20 nt, synthetic construct
  source 1..20: mol_type = other RNA
cccccactaggatgtaaact

SEQ ID NO: 5791 - RNA, 20 nt, synthetic construct
  source 1..20: mol_type = other RNA
tagtgggggagataggaaac

SEQ ID NO: 5792 - RNA, 20 nt, synthetic construct
  source 1..20: mol_type = other RNA
gactgcccaggcagaactct

SEQ ID NO: 5793 - RNA, 20 nt, synthetic construct
  source 1..20: mol_type = other RNA
cagttggggccaccaatgcc

SEQ ID NO: 5794 - RNA, 20 nt, synthetic construct
  source 1..20: mol_type = other RNA
ttggtgcctccagcgactgc

SEQ ID NO: 5795 - RNA, 20 nt, synthetic construct
  source 1..20: mol_type = other RNA
caggctgctgcccacgtggc

SEQ ID NO: 5796 - RNA, 20 nt, synthetic construct
  source 1..20: mol_type = other RNA
cggtggccgaggcagtgggg

SEQ ID NO: 5797 - RNA, 20 nt, synthetic construct
  source 1..20: mol_type = other RNA
ctggtccccctgcacagagc

SEQ ID NO: 5798 - RNA, 20 nt, synthetic construct
  source 1..20: mol_type = other RNA
ggcctacttcatctctggtc

SEQ ID NO: 5799 - RNA, 20 nt, synthetic construct
  source 1..20: mol_type = other RNA
gactgagtgtccttgaaggc

SEQ ID NO: 5800 - RNA, 20 nt, synthetic construct
  source 1..20: mol_type = other RNA
tggaggagggacatttgatc

SEQ ID NO: 5801 - RNA, 20 nt, synthetic construct
  source 1..20: mol_type = other RNA
aatgtccctcctccaagatg

SEQ ID NO: 5802 - RNA, 20 nt, synthetic construct
  source 1..20: mol_type = other RNA
ggagcttgatggatgaatag

SEQ ID NO: 5803 - RNA, 20 nt, synthetic construct
  source 1..20: mol_type = other RNA
agctcccgatcaaatgtccc

SEQ ID NO: 5804 - RNA, 20 nt, synthetic construct
  source 1..20: mol_type = other RNA
atcaagctcccgatcaaatg

SEQ ID NO: 5805 - RNA, 20 nt, synthetic construct
  source 1..20: mol_type = other RNA
gccaggtgaactcctattca

SEQ ID NO: 5806 - RNA, 20 nt, synthetic construct
  source 1..20: mol_type = other RNA
ccatctttcaccattcaccc

SEQ ID NO: 5807 - RNA, 20 nt, synthetic construct
  source 1..20: mol_type = other RNA
ttcaccattcacccctgcac

SEQ ID NO: 5808 - RNA, 20 nt, synthetic construct
  source 1..20: mol_type = other RNA
tggctgcaatgcctggtgca

SEQ ID NO: 5809 - RNA, 20 nt, synthetic construct
  source 1..20: mol_type = other RNA
gtctctgcctcaactcggcc

SEQ ID NO: 5810 - RNA, 20 nt, synthetic construct
  source 1..20: mol_type = other RNA
acttctctgccaaagatgtc

SEQ ID NO: 5811 - RNA, 20 nt, synthetic construct
  source 1..20: mol_type = other RNA
ttggcagagaagtggatcag

SEQ ID NO: 5812 - RNA, 20 nt, synthetic construct
  source 1..20: mol_type = other RNA
atgaggcctggttccctgag

SEQ ID NO: 5813 - RNA, 20 nt, synthetic construct
  source 1..20: mol_type = other RNA
tgcttacctgccccatgggt

SEQ ID NO: 5814 - RNA, 20 nt, synthetic construct
  source 1..20: mol_type = other RNA
tccttacacagacaagggag

SEQ ID NO: 5815 - RNA, 20 nt, synthetic construct
  source 1..20: mol_type = other RNA
tatttaaggtggcgtcatcc

SEQ ID NO: 5816 - RNA, 20 nt, synthetic construct
  source 1..20: mol_type = other RNA
ttagttcatggtaggagaga

SEQ ID NO: 5817 - RNA, 20 nt, synthetic construct
  source 1..20: mol_type = other RNA
caggccctttttgcaggttg

SEQ ID NO: 5818 - RNA, 20 nt, synthetic construct
  source 1..20: mol_type = other RNA
gtgtaggccccgagtgtgct

SEQ ID NO: 5819 - RNA, 20 nt, synthetic construct
  source 1..20: mol_type = other RNA
ggggcgcagcgggcgacggc

SEQ ID NO: 5820 - RNA, 20 nt, synthetic construct
  source 1..20: mol_type = other RNA
tccagactccagctcttctg

SEQ ID NO: 5821 - RNA, 20 nt, synthetic construct
  source 1..20: mol_type = other RNA
agcactgtcctgcagcctct

SEQ ID NO: 5822 - RNA, 20 nt, synthetic construct
  source 1..20: mol_type = other RNA
atccagcactgtcctgcagc

SEQ ID NO: 5823 - RNA, 20 nt, synthetic construct
  source 1..20: mol_type = other RNA
ctgaccctcacgcggccctg

SEQ ID NO: 5824 - RNA, 20 nt, synthetic construct
  source 1..20: mol_type = other RNA
gctactctggactcagccat

SEQ ID NO: 5825 - RNA, 20 nt, synthetic construct
  source 1..20: mol_type = other RNA
ctaggcccctctcactcagg

SEQ ID NO: 5826 - RNA, 20 nt, synthetic construct
  source 1..20: mol_type = other RNA
caaaccagcaaaaaagtgga

SEQ ID NO: 5827 - RNA, 20 nt, synthetic construct
  source 1..20: mol_type = other RNA
attccacttttttgctggtt

SEQ ID NO: 5828 - RNA, 20 nt, synthetic construct
  source 1..20: mol_type = other RNA
acatcaattccacttttttg

SEQ ID NO: 5829 - RNA, 20 nt, synthetic construct
  source 1..20: mol_type = other RNA
tgtagcatcaacatcaattc

SEQ ID NO: 5830 - RNA, 20 nt, synthetic construct
  source 1..20: mol_type = other RNA
gtgcactatcctgtagcatc

SEQ ID NO: 5831 - RNA, 20 nt, synthetic construct
  source 1..20: mol_type = other RNA
ggttgcagcattttggtgga

SEQ ID NO: 5832 - RNA, 20 nt, synthetic construct
  source 1..20: mol_type = other RNA
cctcaagccagaaatgcctg

SEQ ID NO: 5833 - RNA, 20 nt, synthetic construct
  source 1..20: mol_type = other RNA
agccagctccactccaccca

SEQ ID NO: 5834 - RNA, 20 nt, synthetic construct
  source 1..20: mol_type = other RNA
ttgctttggcctcctggatt

SEQ ID NO: 5835 - RNA, 20 nt, synthetic construct
  source 1..20: mol_type = other RNA
aggaggccaaagcaaggatc

SEQ ID NO: 5836 - RNA, 20 nt, synthetic construct
  source 1..20: mol_type = other RNA
ccattttgaaaccactctgt

SEQ ID NO: 5837 - RNA, 20 nt, synthetic construct
  source 1..20: mol_type = other RNA
gtgtccctgccaggggccag

SEQ ID NO: 5838 - RNA, 20 nt, synthetic construct
  source 1..20: mol_type = other RNA
actcaagcaccctcatcagt

SEQ ID NO: 5839 - RNA, 20 nt, synthetic construct
  source 1..20: mol_type = other RNA
tgtctagtccctttctgtgt

SEQ ID NO: 5840 - RNA, 20 nt, synthetic construct
  source 1..20: mol_type = other RNA
gctttagaatgggctttgaa

SEQ ID NO: 5841 - RNA, 20 nt, synthetic construct
  source 1..20: mol_type = other RNA
cacttgtgaggaccaagcct

SEQ ID NO: 5842 - RNA, 20 nt, synthetic construct
  source 1..20: mol_type = other RNA
atgagactcaagcctgactt

SEQ ID NO: 5843 - RNA, 20 nt, synthetic construct
  source 1..20: mol_type = other RNA
cagcttcctcctccataaga

SEQ ID NO: 5844 - RNA, 20 nt, synthetic construct
  source 1..20: mol_type = other RNA
ccttgcaacacaatgaggca

SEQ ID NO: 5845 - RNA, 20 nt, synthetic construct
  source 1..20: mol_type = other RNA
agggcactggcctggagtat

SEQ ID NO: 5846 - RNA, 20 nt, synthetic construct
  source 1..20: mol_type = other RNA
caggtgctttgcctaaggtg

SEQ ID NO: 5847 - RNA, 20 nt, synthetic construct
  source 1..20: mol_type = other RNA
ctgtatgaggaaatgatgag

SEQ ID NO: 5848 - RNA, 20 nt, synthetic construct
  source 1..20: mol_type = other RNA
tttcctcatacagagatgtt

SEQ ID NO: 5849 - RNA, 20 nt, synthetic construct
  source 1..20: mol_type = other RNA
ttactattgttttcatcacc

SEQ ID NO: 5850 - RNA, 20 nt, synthetic construct
  source 1..20: mol_type = other RNA
cccgttgctttaaaatccag

SEQ ID NO: 5851 - RNA, 20 nt, synthetic construct
  source 1..20: mol_type = other RNA
agcctctggtataggcaact

SEQ ID NO: 5852 - RNA, 20 nt, synthetic construct
  source 1..20: mol_type = other RNA
gtgacttcctgctacctgcc

SEQ ID NO: 5853 - RNA, 20 nt, synthetic construct
  source 1..20: mol_type = other RNA
agggatggtgccctgaggct

SEQ ID NO: 5854 - RNA, 20 nt, synthetic construct
  source 1..20: mol_type = other RNA
cttgatgccccaagaggtcc

SEQ ID NO: 5855 - RNA, 20 nt, synthetic construct
  source 1..20: mol_type = other RNA
actctgagcctcttattcca

SEQ ID NO: 5856 - RNA, 20 nt, synthetic construct
  source 1..20: mol_type = other RNA
tacatgccagcctgctgtgc

SEQ ID NO: 5857 - RNA, 20 nt, synthetic construct
  source 1..20: mol_type = other RNA
atcctacatgccagcctgct

SEQ ID NO: 5858 - RNA, 20 nt, synthetic construct
  source 1..20: mol_type = other RNA
ttcctgaacatccatcctac

SEQ ID NO: 5859 - RNA, 20 nt, synthetic construct
  source 1..20: mol_type = other RNA
cgctcccctttggaagtgct

SEQ ID NO: 5860 - RNA, 20 nt, synthetic construct
  source 1..20: mol_type = other RNA
gctgagcacttccaaagggg

SEQ ID NO: 5861 - RNA, 20 nt, synthetic construct
  source 1..20: mol_type = other RNA
gactccatgaagcgcacctc

SEQ ID NO: 5862 - RNA, 20 nt, synthetic construct
  source 1..20: mol_type = other RNA
tcacagtgtccctgtgagta

SEQ ID NO: 5863 - RNA, 20 nt, synthetic construct
  source 1..20: mol_type = other RNA
tacaaatgagtaaacagagc

SEQ ID NO: 5864 - RNA, 20 nt, synthetic construct
  source 1..20: mol_type = other RNA
caggccatagagcccctgcc

SEQ ID NO: 5865 - RNA, 20 nt, synthetic construct
  source 1..20: mol_type = other RNA
ctgggtggaaagatggtgtt

SEQ ID NO: 5866 - RNA, 20 nt, synthetic construct
  source 1..20: mol_type = other RNA
ttccacccagagatggagac

SEQ ID NO: 5867 - RNA, 20 nt, synthetic construct
  source 1..20: mol_type = other RNA
ctttttttctttgagttgtt

SEQ ID NO: 5868 - RNA, 20 nt, synthetic construct
  source 1..20: mol_type = other RNA
gaccctctctctttaaggtc

SEQ ID NO: 5869 - RNA, 20 nt, synthetic construct
  source 1..20: mol_type = other RNA
ccatcagaccctctctcttt

SEQ ID NO: 5870 - RNA, 20 nt, synthetic construct
  source 1..20: mol_type = other RNA
cagcatttcacatctgagct

SEQ ID NO: 5871 - RNA, 20 nt, synthetic construct
  source 1..20: mol_type = other RNA
gagctggctttcctctgccc

SEQ ID NO: 5872 - RNA, 20 nt, synthetic construct
  source 1..20: mol_type = other RNA
acgcttcctgctgccatgcc

SEQ ID NO: 5873 - RNA, 20 nt, synthetic construct
  source 1..20: mol_type = other RNA
cggcccctcaggagcaggtg

SEQ ID NO: 5874 - RNA, 20 nt, synthetic construct
  source 1..20: mol_type = other RNA
gggtggcggtttgccaggta

SEQ ID NO: 5875 - RNA, 20 nt, synthetic construct
  source 1..20: mol_type = other RNA
acctggcaaaccgccaccct

SEQ ID NO: 5876 - RNA, 20 nt, synthetic construct
  source 1..20: mol_type = other RNA
ggacaaaagcaaaaacagac

SEQ ID NO: 5877 - RNA, 20 nt, synthetic construct
  source 1..20: mol_type = other RNA
gtaaggtttgctacctgggt

SEQ ID NO: 5878 - RNA, 20 nt, synthetic construct
  source 1..20: mol_type = other RNA
ataaatgcatgcatattgca

SEQ ID NO: 5879 - RNA, 20 nt, synthetic construct
  source 1..20: mol_type = other RNA
atcaataaatgcatgcatat

SEQ ID NO: 5880 - RNA, 20 nt, synthetic construct
  source 1..20: mol_type = other RNA
atttttttctgagatggggt

SEQ ID NO: 5881 - RNA, 20 nt, synthetic construct
  source 1..20: mol_type = other RNA
cagaaaaaaatagatcaatc

SEQ ID NO: 5882 - RNA, 20 nt, synthetic construct
  source 1..20: mol_type = other RNA
tctggtctcagcctccccaa

SEQ ID NO: 5883 - RNA, 20 nt, synthetic construct
  source 1..20: mol_type = other RNA
caacacttggggaggctgag

SEQ ID NO: 5884 - RNA, 20 nt, synthetic construct
  source 1..20: mol_type = other RNA
gagaggccaggtgcagcggc

SEQ ID NO: 5885 - RNA, 20 nt, synthetic construct
  source 1..20: mol_type = other RNA
atttaacaaacctgctggga

SEQ ID NO: 5886 - RNA, 20 nt, synthetic construct
  source 1..20: mol_type = other RNA
cggcagggccttttcttgcc

SEQ ID NO: 5887 - RNA, 20 nt, synthetic construct
  source 1..20: mol_type = other RNA
acacagacttgcattttaaa

SEQ ID NO: 5888 - RNA, 20 nt, synthetic construct
  source 1..20: mol_type = other RNA
agaccagaatcaacacagac

SEQ ID NO: 5889 - RNA, 20 nt, synthetic construct
  source 1..20: mol_type = other RNA
aagaccaagactgtcttttg

SEQ ID NO: 5890 - RNA, 20 nt, synthetic construct
  source 1..20: mol_type = other RNA
acttgccctgggtacactga

SEQ ID NO: 5891 - RNA, 20 nt, synthetic construct
  source 1..20: mol_type = other RNA
ctccccagtgccaggaagag

SEQ ID NO: 5892 - RNA, 20 nt, synthetic construct
  source 1..20: mol_type = other RNA
attttagtggaggaagacag

SEQ ID NO: 5893 - RNA, 20 nt, synthetic construct
  source 1..20: mol_type = other RNA
tttcagtactctatattaat

SEQ ID NO: 5894 - RNA, 20 nt, synthetic construct
  source 1..20: mol_type = other RNA
catcttttcagtactctata

SEQ ID NO: 5895 - RNA, 20 nt, synthetic construct
  source 1..20: mol_type = other RNA
ccacctgggggcctttgctt

SEQ ID NO: 5896 - RNA, 20 nt, synthetic construct
  source 1..20: mol_type = other RNA
cataactattcccacctctc

SEQ ID NO: 5897 - RNA, 20 nt, synthetic construct
  source 1..20: mol_type = other RNA
aggccagaccacactcctct

SEQ ID NO: 5898 - RNA, 20 nt, synthetic construct
  source 1..20: mol_type = other RNA
gaacctctcactgtggccta

SEQ ID NO: 5899 - RNA, 20 nt, synthetic construct
  source 1..20: mol_type = other RNA
cttctcagctcagcagctag

SEQ ID NO: 5900 - RNA, 20 nt, synthetic construct
  source 1..20: mol_type = other RNA
acccaccaggcctgcaggct

SEQ ID NO: 5901 - RNA, 20 nt, synthetic construct
  source 1..20: mol_type = other RNA
tccccctctcccacccacat

SEQ ID NO: 5902 - RNA, 20 nt, synthetic construct
  source 1..20: mol_type = other RNA
gtccaggggcccgagccttg

SEQ ID NO: 5903 - RNA, 20 nt, synthetic construct
  source 1..20: mol_type = other RNA
cacttaatggcaactccatc

SEQ ID NO: 5904 - RNA, 20 nt, synthetic construct
  source 1..20: mol_type = other RNA
gtttcagagggatgagtttg

SEQ ID NO: 5905 - RNA, 20 nt, synthetic construct
  source 1..20: mol_type = other RNA
ctctgaaactgatggcccca

SEQ ID NO: 5906 - RNA, 20 nt, synthetic construct
  source 1..20: mol_type = other RNA
gtctatctccacggccctca

SEQ ID NO: 5907 - RNA, 20 nt, synthetic construct
  source 1..20: mol_type = other RNA
ccacggccctcaaaccaggc

SEQ ID NO: 5908 - RNA, 20 nt, synthetic construct
  source 1..20: mol_type = other RNA
cccaccccgcacctcccacc

SEQ ID NO: 5909 - RNA, 20 nt, synthetic construct
  source 1..20: mol_type = other RNA
ttctgtgaggccaaagtgca

SEQ ID NO: 5910 - RNA, 20 nt, synthetic construct
  source 1..20: mol_type = other RNA
gctgccggagccggcacctg

SEQ ID NO: 5911 - RNA, 20 nt, synthetic construct
  source 1..20: mol_type = other RNA
caggatgggtgtctggggag

SEQ ID NO: 5912 - RNA, 20 nt, synthetic construct
  source 1..20: mol_type = other RNA
tgggatggggctgtcactgg

SEQ ID NO: 5913 - RNA, 20 nt, synthetic construct
  source 1..20: mol_type = other RNA
cctcgtgccaggccatggag

SEQ ID NO: 5914 - RNA, 20 nt, synthetic construct
  source 1..20: mol_type = other RNA
ccatcccctcgtgccaggcc

SEQ ID NO: 5915 - RNA, 20 nt, synthetic construct
  source 1..20: mol_type = other RNA
gcacattgggagcagctggc

SEQ ID NO: 5916 - RNA, 20 nt, synthetic construct
  source 1..20: mol_type = other RNA
tcaggtctccaccaaggagg

SEQ ID NO: 5917 - RNA, 20 nt, synthetic construct
  source 1..20: mol_type = other RNA
tgcctccttggtggagacct

SEQ ID NO: 5918 - RNA, 20 nt, synthetic construct
  source 1..20: mol_type = other RNA
atgggaagaatcctgcctcc

SEQ ID NO: 5919 - RNA, 20 nt, synthetic construct
  source 1..20: mol_type = other RNA
ttggggggtgagtgtgaaag

SEQ ID NO: 5920 - RNA, 20 nt, synthetic construct
  source 1..20: mol_type = other RNA
gcacctttcacactcacccc

SEQ ID NO: 5921 - RNA, 20 nt, synthetic construct
  source 1..20: mol_type = other RNA
ccagctaactgtggagaagc

SEQ ID NO: 5922 - RNA, 20 nt, synthetic construct
  source 1..20: mol_type = other RNA
gggagcccccaggggcttct

SEQ ID NO: 5923 - RNA, 20 nt, synthetic construct
  source 1..20: mol_type = other RNA
agaaagctaagcctccatta

SEQ ID NO: 5924 - RNA, 20 nt, synthetic construct
  source 1..20: mol_type = other RNA
agccagaggctggagacagg

SEQ ID NO: 5925 - RNA, 20 nt, synthetic construct
  source 1..20: mol_type = other RNA
cctaggactgactcggcagt

SEQ ID NO: 5926 - RNA, 20 nt, synthetic construct
  source 1..20: mol_type = other RNA
gcgtttctggctcagttcct

SEQ ID NO: 5927 - RNA, 20 nt, synthetic construct
  source 1..20: mol_type = other RNA
ctcaccgagcttcctggtct

SEQ ID NO: 5928 - RNA, 20 nt, synthetic construct
  source 1..20: mol_type = other RNA
ttctgccatcactcaccgag

SEQ ID NO: 5929 - RNA, 20 nt, synthetic construct
  source 1..20: mol_type = other RNA
cccaggcctgattcactggc

SEQ ID NO: 5930 - RNA, 20 nt, synthetic construct
  source 1..20: mol_type = other RNA
ggcctgggtgataacggaaa

SEQ ID NO: 5931 - RNA, 20 nt, synthetic construct
  source 1..20: mol_type = other RNA
ccgccaggccagtgaatcag

SEQ ID NO: 5932 - RNA, 20 nt, synthetic construct
  source 1..20: mol_type = other RNA
tttgggtctgtcctctctgt

SEQ ID NO: 5933 - RNA, 20 nt, synthetic construct
  source 1..20: mol_type = other RNA
tcaagttacaaaagcaaaac

SEQ ID NO: 5934 - RNA, 20 nt, synthetic construct
  source 1..20: mol_type = other RNA
ccctaggcagtcaagtctat

SEQ ID NO: 5935 - RNA, 20 nt, synthetic construct
  source 1..20: mol_type = other RNA
aatacttggcttactcaact

SEQ ID NO: 5936 - RNA, 20 nt, synthetic construct
  source 1..20: mol_type = other RNA
tgagtacaagtattgggcaa

SEQ ID NO: 5937 - RNA, 20 nt, synthetic construct
  source 1..20: mol_type = other RNA
ccagtacttgcccaatactt

SEQ ID NO: 5938 - RNA, 20 nt, synthetic construct
  source 1..20: mol_type = other RNA
taggaatgaaatgaatgtct

SEQ ID NO: 5939 - RNA, 20 nt, synthetic construct
  source 1..20: mol_type = other RNA
agagtgctgtagggcacctg

SEQ ID NO: 5940 - RNA, 20 nt, synthetic construct
  source 1..20: mol_type = other RNA
ggcactgtaacttattccgt

SEQ ID NO: 5941 - RNA, 20 nt, synthetic construct
  source 1..20: mol_type = other RNA
tgaaaaaagccatggactta

SEQ ID NO: 5942 - RNA, 20 nt, synthetic construct
  source 1..20: mol_type = other RNA
gagactgttctgaattttaa

SEQ ID NO: 5943 - RNA, 20 nt, synthetic construct
  source 1..20: mol_type = other RNA
cagtactttgggaggctgag

SEQ ID NO: 5944 - RNA, 20 nt, synthetic construct
  source 1..20: mol_type = other RNA
tcctgcctcagcctcccaaa

SEQ ID NO: 5945 - RNA, 20 nt, synthetic construct
  source 1..20: mol_type = other RNA
tttaaatttttttatagaga

SEQ ID NO: 5946 - RNA, 20 nt, synthetic construct
  source 1..20: mol_type = other RNA
gcctcctgagtagccgggac

SEQ ID NO: 5947 - RNA, 20 nt, synthetic construct
  source 1..20: mol_type = other RNA
tcactgcactgcagcctggg

SEQ ID NO: 5948 - RNA, 20 nt, synthetic construct
  source 1..20: mol_type = other RNA
ctgcactgcagcctgggtta

SEQ ID NO: 5949 - RNA, 20 nt, synthetic construct
  source 1..20: mol_type = other RNA
ttatgcactctgtaacccag

SEQ ID NO: 5950 - RNA, 20 nt, synthetic construct
  source 1..20: mol_type = other RNA
cattcaatgtgggacctcca

SEQ ID NO: 5951 - RNA, 20 nt, synthetic construct
  source 1..20: mol_type = other RNA
caggcaaaattcctcccaga

SEQ ID NO: 5952 - RNA, 20 nt, synthetic construct
  source 1..20: mol_type = other RNA
gggaggaattttgcctgaga

SEQ ID NO: 5953 - RNA, 20 nt, synthetic construct
  source 1..20: mol_type = other RNA
gtcaactcttgaatgctttc

SEQ ID NO: 5954 - RNA, 20 nt, synthetic construct
  source 1..20: mol_type = other RNA
ctgcccgttggaacctaggc

SEQ ID NO: 5955 - RNA, 20 nt, synthetic construct
  source 1..20: mol_type = other RNA
agtatcagctggttagagat

SEQ ID NO: 5956 - RNA, 20 nt, synthetic construct
  source 1..20: mol_type = other RNA
gctggttagagatccacacc

SEQ ID NO: 5957 - RNA, 20 nt, synthetic construct
  source 1..20: mol_type = other RNA
ctaaccagctgatacttgat

SEQ ID NO: 5958 - RNA, 20 nt, synthetic construct
  source 1..20: mol_type = other RNA
acaccctgacagctctgtga

SEQ ID NO: 5959 - RNA, 20 nt, synthetic construct
  source 1..20: mol_type = other RNA
cagagctgtcagggtgtgga

SEQ ID NO: 5960 - RNA, 20 nt, synthetic construct
  source 1..20: mol_type = other RNA
ctggtgaccacctgctaacc

SEQ ID NO: 5961 - RNA, 20 nt, synthetic construct
  source 1..20: mol_type = other RNA
gggaggaaggggtgtggctt

SEQ ID NO: 5962 - RNA, 20 nt, synthetic construct
  source 1..20: mol_type = other RNA
ggactagcaaatagggaagg

SEQ ID NO: 5963 - RNA, 20 nt, synthetic construct
  source 1..20: mol_type = other RNA
cacaggtctcagtctcattc

SEQ ID NO: 5964 - RNA, 20 nt, synthetic construct
  source 1..20: mol_type = other RNA
agcaagaagcccagtgtgac

SEQ ID NO: 5965 - RNA, 20 nt, synthetic construct
  source 1..20: mol_type = other RNA
tgtcgctggtcacactgggc

SEQ ID NO: 5966 - RNA, 20 nt, synthetic construct
  source 1..20: mol_type = other RNA
atgctggggaccacttggga

SEQ ID NO: 5967 - RNA, 20 nt, synthetic construct
  source 1..20: mol_type = other RNA
ccaccaaagcttttggctct

SEQ ID NO: 5968 - RNA, 20 nt, synthetic construct
  source 1..20: mol_type = other RNA
acctaagttcagcatcctcc

SEQ ID NO: 5969 - RNA, 20 nt, synthetic construct
  source 1..20: mol_type = other RNA
tcctctaagctttgcagatg

SEQ ID NO: 5970 - RNA, 20 nt, synthetic construct
  source 1..20: mol_type = other RNA
gcaaagcttagaggaggatg

SEQ ID NO: 5971 - RNA, 20 nt, synthetic construct
  source 1..20: mol_type = other RNA
tgaaatggtcagcccctcca

SEQ ID NO: 5972 - RNA, 20 nt, synthetic construct
  source 1..20: mol_type = other RNA
acagcatttagcaccaggca

SEQ ID NO: 5973 - RNA, 20 nt, synthetic construct
  source 1..20: mol_type = other RNA
gaacacagccgtagtgggcg

SEQ ID NO: 5974 - RNA, 20 nt, synthetic construct
  source 1..20: mol_type = other RNA
acttccttttgaaattttat

SEQ ID NO: 5975 - RNA, 20 nt, synthetic construct
  source 1..20: mol_type = other RNA
tgtttataaaatttcaaaag

SEQ ID NO: 5976 - RNA, 20 nt, synthetic construct
  source 1..20: mol_type = other RNA
aggtgtgtgcagttaccttc

SEQ ID NO: 5977 - RNA, 20 nt, synthetic construct
  source 1..20: mol_type = other RNA
gacttaccctgtcctgcccc

SEQ ID NO: 5978 - RNA, 20 nt, synthetic construct
  source 1..20: mol_type = other RNA
tcagacttaccctgtcctgc

SEQ ID NO: 5979 - RNA, 20 nt, synthetic construct
  source 1..20: mol_type = other RNA
caccacgacttctcctggag

SEQ ID NO: 5980 - RNA, 20 nt, synthetic construct
  source 1..20: mol_type = other RNA
cagcgggcatctcaccacga

SEQ ID NO: 5981 - RNA, 20 nt, synthetic construct
  source 1..20: mol_type = other RNA
tgggaaagaaaacaagcatc

SEQ ID NO: 5982 - RNA, 20 nt, synthetic construct
  source 1..20: mol_type = other RNA
gccatcttaagatcggcctc

SEQ ID NO: 5983 - RNA, 20 nt, synthetic construct
  source 1..20: mol_type = other RNA
taagatcggcctcactaagg

SEQ ID NO: 5984 - RNA, 20 nt, synthetic construct
  source 1..20: mol_type = other RNA
taagatggccgattctgccc

SEQ ID NO: 5985 - RNA, 20 nt, synthetic construct
  source 1..20: mol_type = other RNA
gcctcactaagggagcttct

SEQ ID NO: 5986 - RNA, 20 nt, synthetic construct
  source 1..20: mol_type = other RNA
tcatccaaaaaattggcagt

SEQ ID NO: 5987 - RNA, 20 nt, synthetic construct
  source 1..20: mol_type = other RNA
aaaaaattggcagtaaaaat

SEQ ID NO: 5988 - RNA, 20 nt, synthetic construct
  source 1..20: mol_type = other RNA
gcaggttcattgactgtagc

SEQ ID NO: 5989 - RNA, 20 nt, synthetic construct
  source 1..20: mol_type = other RNA
agtggttaccagcaaagtga

SEQ ID NO: 5990 - RNA, 20 nt, synthetic construct
  source 1..20: mol_type = other RNA
ttttcactttgctggtaacc

SEQ ID NO: 5991 - RNA, 20 nt, synthetic construct
  source 1..20: mol_type = other RNA
tgttgcttatattgttgctg

SEQ ID NO: 5992 - RNA, 20 nt, synthetic construct
  source 1..20: mol_type = other RNA
gaagcgtataatatacacgg

SEQ ID NO: 5993 - RNA, 20 nt, synthetic construct
  source 1..20: mol_type = other RNA
tccaccgtgtatattatacg

SEQ ID NO: 5994 - RNA, 20 nt, synthetic construct
  source 1..20: mol_type = other RNA
tgatgaagctttacagtgag

SEQ ID NO: 5995 - RNA, 20 nt, synthetic construct
  source 1..20: mol_type = other RNA
ggatcgtccaccgtgtatat

SEQ ID NO: 5996 - RNA, 20 nt, synthetic construct
  source 1..20: mol_type = other RNA
ggagtgaaattgccacttct

SEQ ID NO: 5997 - RNA, 20 nt, synthetic construct
  source 1..20: mol_type = other RNA
ctggcgactgcactctcagg

SEQ ID NO: 5998 - RNA, 20 nt, synthetic construct
  source 1..20: mol_type = other RNA
tcgctggcgactgcactctc

SEQ ID NO: 5999 - RNA, 20 nt, synthetic construct
  source 1..20: mol_type = other RNA
cagtgtggatcatcgccagc

SEQ ID NO: 6000 - RNA, 20 nt, synthetic construct
  source 1..20: mol_type = other RNA
acactgggatatcatcgctg

SEQ ID NO: 6001 - RNA, 20 nt, synthetic construct
  source 1..20: mol_type = other RNA
tcgccagcatttcaaggtca

SEQ ID NO: 6002 - RNA, 20 nt, synthetic construct
  source 1..20: mol_type = other RNA
ccagcatttcaaggtcatgt

SEQ ID NO: 6003 - RNA, 20 nt, synthetic construct
  source 1..20: mol_type = other RNA
cttggtgaggatgtgggcgg

SEQ ID NO: 6004 - RNA, 20 nt, synthetic construct
  source 1..20: mol_type = other RNA
tcaccaagagattgtgtggg

SEQ ID NO: 6005 - RNA, 20 nt, synthetic construct
  source 1..20: mol_type = other RNA
catttcaaactgcaagacca

SEQ ID NO: 6006 - RNA, 20 nt, synthetic construct
  source 1..20: mol_type = other RNA
tctcagtgtgtttgacaaag

SEQ ID NO: 6007 - RNA, 20 nt, synthetic construct
  source 1..20: mol_type = other RNA
cattactgtgctctcgccat

SEQ ID NO: 6008 - RNA, 20 nt, synthetic construct
  source 1..20: mol_type = other RNA
gcctggccacatgcccacac

SEQ ID NO: 6009 - RNA, 20 nt, synthetic construct
  source 1..20: mol_type = other RNA
gacagtgaaaacctggcact

SEQ ID NO: 6010 - RNA, 20 nt, synthetic construct
  source 1..20: mol_type = other RNA
caccatgcacagaactaggg

SEQ ID NO: 6011 - RNA, 20 nt, synthetic construct
  source 1..20: mol_type = other RNA
atttagtcgtatttccaaag

SEQ ID NO: 6012 - RNA, 20 nt, synthetic construct
  source 1..20: mol_type = other RNA
taaaccttgactgacttttc

SEQ ID NO: 6013 - RNA, 20 nt, synthetic construct
  source 1..20: mol_type = other RNA
tttgcttttgcttaaaacat

SEQ ID NO: 6014 - RNA, 20 nt, synthetic construct
  source 1..20: mol_type = other RNA
gcaatcgtttgcttttgctt

SEQ ID NO: 6015 - RNA, 20 nt, synthetic construct
  source 1..20: mol_type = other RNA
catgatttaagactacagtt

SEQ ID NO: 6016 - RNA, 20 nt, synthetic construct
  source 1..20: mol_type = other RNA
tgtgatctgcaatcgtttgc

SEQ ID NO: 6017 - RNA, 20 nt, synthetic construct
  source 1..20: mol_type = other RNA
ttttaatgcttggagacata

SEQ ID NO: 6018 - RNA, 20 nt, synthetic construct
  source 1..20: mol_type = other RNA
taaagtgcttttattttgct

SEQ ID NO: 6019 - RNA, 20 nt, synthetic construct
  source 1..20: mol_type = other RNA
gtttggggaacaactcataa

SEQ ID NO: 6020 - RNA, 20 nt, synthetic construct
  source 1..20: mol_type = other RNA
attacttaaagaagttatga

SEQ ID NO: 6021 - RNA, 20 nt, synthetic construct
  source 1..20: mol_type = other RNA
aattatatcagaaaaatatc

SEQ ID NO: 6022 - RNA, 20 nt, synthetic construct
  source 1..20: mol_type = other RNA
gaaaaatatcttcaagagct

SEQ ID NO: 6023 - RNA, 20 nt, synthetic construct
  source 1..20: mol_type = other RNA
tcaagagcttagtatttccc

SEQ ID NO: 6024 - RNA, 20 nt, synthetic construct
  source 1..20: mol_type = other RNA
aaaattgggaaatactaagc

SEQ ID NO: 6025 - RNA, 20 nt, synthetic construct
  source 1..20: mol_type = other RNA
tgatcctggtaacctttcat

SEQ ID NO: 6026 - RNA, 20 nt, synthetic construct
  source 1..20: mol_type = other RNA
ggatcaaaaattgggaaata

SEQ ID NO: 6027 - RNA, 20 nt, synthetic construct
  source 1..20: mol_type = other RNA
tggtaacctttcatcaagat

SEQ ID NO: 6028 - RNA, 20 nt, synthetic construct
  source 1..20: mol_type = other RNA
agatccaagcttatgcatag

SEQ ID NO: 6029 - RNA, 20 nt, synthetic construct
  source 1..20: mol_type = other RNA
tgatgaaaggttaccaggat

SEQ ID NO: 6030 - RNA, 20 nt, synthetic construct
  source 1..20: mol_type = other RNA
aagcttatgcatagggttct

SEQ ID NO: 6031 - RNA, 20 nt, synthetic construct
  source 1..20: mol_type = other RNA
agacccatctgaaattctat

SEQ ID NO: 6032 - RNA, 20 nt, synthetic construct
  source 1..20: mol_type = other RNA
gaaattctatacaaataggg

SEQ ID NO: 6033 - RNA, 20 nt, synthetic construct
  source 1..20: mol_type = other RNA
ttacatcattttaaattgga

SEQ ID NO: 6034 - RNA, 20 nt, synthetic construct
  source 1..20: mol_type = other RNA
ttttaaattggatattcctg

SEQ ID NO: 6035 - RNA, 20 nt, synthetic construct
  source 1..20: mol_type = other RNA
aatttaaaatgatgtaaaga

SEQ ID NO: 6036 - RNA, 20 nt, synthetic construct
  source 1..20: mol_type = other RNA
tgcagtaatattaaacagga

SEQ ID NO: 6037 - RNA, 20 nt, synthetic construct
  source 1..20: mol_type = other RNA
aaaagcagcttgctttttct

SEQ ID NO: 6038 - RNA, 20 nt, synthetic construct
  source 1..20: mol_type = other RNA
tagagaaagcaacagcttta

SEQ ID NO: 6039 - RNA, 20 nt, synthetic construct
  source 1..20: mol_type = other RNA
ccacagaaatgtgaatccac

SEQ ID NO: 6040 - RNA, 20 nt, synthetic construct
  source 1..20: mol_type = other RNA
acatatagaccacgctcccg

SEQ ID NO: 6041 - RNA, 20 nt, synthetic construct
  source 1..20: mol_type = other RNA
gctgtcccgggagcgtggtc

SEQ ID NO: 6042 - RNA, 20 nt, synthetic construct
  source 1..20: mol_type = other RNA
acatgccggagttctcccac

SEQ ID NO: 6043 - RNA, 20 nt, synthetic construct
  source 1..20: mol_type = other RNA
tgtatttctcaaggaaagca

SEQ ID NO: 6044 - RNA, 20 nt, synthetic construct
  source 1..20: mol_type = other RNA
gcccaagtcacagcagcttt

SEQ ID NO: 6045 - RNA, 20 nt, synthetic construct
  source 1..20: mol_type = other RNA
ccaggctcttccaaagggtt

SEQ ID NO: 6046 - RNA, 20 nt, synthetic construct
  source 1..20: mol_type = other RNA
cgaaccctttggaagagcct

SEQ ID NO: 6047 - RNA, 20 nt, synthetic construct
  source 1..20: mol_type = other RNA
gaatctcgaaccctttggaa

SEQ ID NO: 6048 - RNA, 20 nt, synthetic construct
  source 1..20: mol_type = other RNA
agtattgtgtcttgactcct

SEQ ID NO: 6049 - RNA, 20 nt, synthetic construct
  source 1..20: mol_type = other RNA
ctagaggaacatgcccagcc

SEQ ID NO: 6050 - RNA, 20 nt, synthetic construct
  source 1..20: mol_type = other RNA
acatcatcaaggtcacttct

SEQ ID NO: 6051 - RNA, 20 nt, synthetic construct
  source 1..20: mol_type = other RNA
tcaaggtcacttctcaactc

SEQ ID NO: 6052 - RNA, 20 nt, synthetic construct
  source 1..20: mol_type = other RNA
aggtcacttctcaactcacc

SEQ ID NO: 6053 - RNA, 20 nt, synthetic construct
  source 1..20: mol_type = other RNA
tcatgggagattctgaaccc

SEQ ID NO: 6054 - RNA, 20 nt, synthetic construct
  source 1..20: mol_type = other RNA
tgggagattctgaaccctgc

SEQ ID NO: 6055 - RNA, 20 nt, synthetic construct
  source 1..20: mol_type = other RNA
cccatgatgattggtgagtt

SEQ ID NO: 6056 - RNA, 20 nt, synthetic construct
  source 1..20: mol_type = other RNA
ggcaacttaatgcaatgttt

SEQ ID NO: 6057 - RNA, 20 nt, synthetic construct
  source 1..20: mol_type = other RNA
aagggtaataaaatgtgata

SEQ ID NO: 6058 - RNA, 20 nt, synthetic construct
  source 1..20: mol_type = other RNA
cattttattaccctttgata

SEQ ID NO: 6059 - RNA, 20 nt, synthetic construct
  source 1..20: mol_type = other RNA
aatatttgacaattcatgat

SEQ ID NO: 6060 - RNA, 20 nt, synthetic construct
  source 1..20: mol_type = other RNA
tgaattgtcaaatattagat

SEQ ID NO: 6061 - RNA, 20 nt, synthetic construct
  source 1..20: mol_type = other RNA
tagaaatgtacatgttttac

SEQ ID NO: 6062 - RNA, 20 nt, synthetic construct
  source 1..20: mol_type = other RNA
catttagtcagtgaaacaac

SEQ ID NO: 6063 - RNA, 20 nt, synthetic construct
  source 1..20: mol_type = other RNA
ctgctctgcgttctcacatg

SEQ ID NO: 6064 - RNA, 20 nt, synthetic construct
  source 1..20: mol_type = other RNA
atgcctctcccagctttatc

SEQ ID NO: 6065 - RNA, 20 nt, synthetic construct
  source 1..20: mol_type = other RNA
gtgtggcctttggcttacac

SEQ ID NO: 6066 - RNA, 20 nt, synthetic construct
  source 1..20: mol_type = other RNA
ttctgaatactcaccgtgtg

SEQ ID NO: 6067 - RNA, 20 nt, synthetic construct
  source 1..20: mol_type = other RNA
gccccatggcacacggtgag

SEQ ID NO: 6068 - RNA, 20 nt, synthetic construct
  source 1..20: mol_type = other RNA
agttggagctggggtgggga

SEQ ID NO: 6069 - RNA, 20 nt, synthetic construct
  source 1..20: mol_type = other RNA
aatgtactctcttccttcca

SEQ ID NO: 6070 - RNA, 20 nt, synthetic construct
  source 1..20: mol_type = other RNA
cagctacttgggaggctgag

SEQ ID NO: 6071 - RNA, 20 nt, synthetic construct
  source 1..20: mol_type = other RNA
ctggaacctgggagaaggag

SEQ ID NO: 6072 - RNA, 20 nt, synthetic construct
  source 1..20: mol_type = other RNA
cacctcactgctacctcctt

SEQ ID NO: 6073 - RNA, 20 nt, synthetic construct
  source 1..20: mol_type = other RNA
caaaaaaaaaaaaaaaaaaa

SEQ ID NO: 6074 - RNA, 20 nt, synthetic construct
  source 1..20: mol_type = other RNA
gaaaatgggggtggggaggt

SEQ ID NO: 6075 - RNA, 20 nt, synthetic construct
  source 1..20: mol_type = other RNA
agcacctgcgcacctcccca

SEQ ID NO: 6076 - RNA, 20 nt, synthetic construct
  source 1..20: mol_type = other RNA
agcaggactgtgttgaggat

SEQ ID NO: 6077 - RNA, 20 nt, synthetic construct
  source 1..20: mol_type = other RNA
tcaacacagtcctgcttgat

SEQ ID NO: 6078 - RNA, 20 nt, synthetic construct
  source 1..20: mol_type = other RNA
cctcacctccacccctgctt

SEQ ID NO: 6079 - RNA, 20 nt, synthetic construct
  source 1..20: mol_type = other RNA
ttacagatgtaggcagagag

SEQ ID NO: 6080 - RNA, 20 nt, synthetic construct
  source 1..20: mol_type = other RNA
gtaaggatcccctcacctcc

SEQ ID NO: 6081 - RNA, 20 nt, synthetic construct
  source 1..20: mol_type = other RNA
gcccctctctgcctacatct

SEQ ID NO: 6082 - RNA, 20 nt, synthetic construct
  source 1..20: mol_type = other RNA
cggacagctccctttgaaag

SEQ ID NO: 6083 - RNA, 20 nt, synthetic construct
  source 1..20: mol_type = other RNA
cacacacagcacccccatgt

SEQ ID NO: 6084 - RNA, 20 nt, synthetic construct
  source 1..20: mol_type = other RNA
agtctgaggtctttaaggta

SEQ ID NO: 6085 - RNA, 20 nt, synthetic construct
  source 1..20: mol_type = other RNA
agctctcttgttcttgacgt

SEQ ID NO: 6086 - RNA, 20 nt, synthetic construct
  source 1..20: mol_type = other RNA
aaggtgggtgcggagagaat

SEQ ID NO: 6087 - RNA, 20 nt, synthetic construct
  source 1..20: mol_type = other RNA
tcctgccctcactccatatt

SEQ ID NO: 6088 - RNA, 20 nt, synthetic construct
  source 1..20: mol_type = other RNA
agcgctcctggcgctcttcc

SEQ ID NO: 6089 - RNA, 20 nt, synthetic construct
  source 1..20: mol_type = other RNA
tagccgactgctcggcagca

SEQ ID NO: 6090 - RNA, 20 nt, synthetic construct
  source 1..20: mol_type = other RNA
ctcactcgctcttcagcctc

SEQ ID NO: 6091 - RNA, 20 nt, synthetic construct
  source 1..20: mol_type = other RNA
agaacgctccaccctgccag

SEQ ID NO: 6092 - RNA, 20 nt, synthetic construct
  source 1..20: mol_type = other RNA
ccgcccaccttggcagagct

SEQ ID NO: 6093 - RNA, 20 nt, synthetic construct
  source 1..20: mol_type = other RNA
gcactgttcttgtctcctct

SEQ ID NO: 6094 - RNA, 20 nt, synthetic construct
  source 1..20: mol_type = other RNA
cctacttcatttgcagagaa

SEQ ID NO: 6095 - RNA, 20 nt, synthetic construct
  source 1..20: mol_type = other RNA
ctgtgctgggctgcagttac

SEQ ID NO: 6096 - RNA, 20 nt, synthetic construct
  source 1..20: mol_type = other RNA
gggtgacagctgcctcacat

SEQ ID NO: 6097 - RNA, 20 nt, synthetic construct
  source 1..20: mol_type = other RNA
tcataagcactatgtgaggc

SEQ ID NO: 6098 - RNA, 20 nt, synthetic construct
  source 1..20: mol_type = other RNA
gaaagataacacttaaaaaa

SEQ ID NO: 6099 - RNA, 20 nt, synthetic construct
  source 1..20: mol_type = other RNA
ttcggatcctcataagcact

SEQ ID NO: 6100 - RNA, 20 nt, synthetic construct
  source 1..20: mol_type = other RNA
gtaacattcatttaatgggg

SEQ ID NO: 6101 - RNA, 20 nt, synthetic construct
  source 1..20: mol_type = other RNA
ttacgtctttccaatagtct

SEQ ID NO: 6102 - RNA, 20 nt, synthetic construct
  source 1..20: mol_type = other RNA
ttatagtagaaaaagaaaat

SEQ ID NO: 6103 - RNA, 20 nt, synthetic construct
  source 1..20: mol_type = other RNA
ccctgtgccctggcttcatc

SEQ ID NO: 6104 - RNA, 20 nt, synthetic construct
  source 1..20: mol_type = other RNA
ggactacctgcaggctgatc

SEQ ID NO: 6105 - RNA, 20 nt, synthetic construct
  source 1..20: mol_type = other RNA
gcctgcaggtagtcccgatg

SEQ ID NO: 6106 - RNA, 20 nt, synthetic construct
  source 1..20: mol_type = other RNA
gggtggccagccacaaacac

SEQ ID NO: 6107 - RNA, 20 nt, synthetic construct
  source 1..20: mol_type = other RNA
cagctcagcatatgcactaa

SEQ ID NO: 6108 - RNA, 20 nt, synthetic construct
  source 1..20: mol_type = other RNA
ctagagggcagcgctggtaa

SEQ ID NO: 6109 - RNA, 20 nt, synthetic construct
  source 1..20: mol_type = other RNA
tgttttccctcagctgtgga

SEQ ID NO: 6110 - RNA, 20 nt, synthetic construct
  source 1..20: mol_type = other RNA
acagcaggtataacggtcag

SEQ ID NO: 6111 - RNA, 20 nt, synthetic construct
  source 1..20: mol_type = other RNA
ggaagcagtaatgggtcgga

SEQ ID NO: 6112 - RNA, 20 nt, synthetic construct
  source 1..20: mol_type = other RNA
tctgcaggacacgttagcgt

SEQ ID NO: 6113 - RNA, 20 nt, synthetic construct
  source 1..20: mol_type = other RNA
gaccttcagtgggaccggag

SEQ ID NO: 6114 - RNA, 20 nt, synthetic construct
  source 1..20: mol_type = other RNA
cagtcaccagaaccccctca

SEQ ID NO: 6115 - RNA, 20 nt, synthetic construct
  source 1..20: mol_type = other RNA
gcacaaatttgtgtaagtgt

SEQ ID NO: 6116 - RNA, 20 nt, synthetic construct
  source 1..20: mol_type = other RNA
gttttcttttcatagaaatc

SEQ ID NO: 6117 - RNA, 20 nt, synthetic construct
  source 1..20: mol_type = other RNA
aattgtttcttctgcttgtt

SEQ ID NO: 6118 - RNA, 20 nt, synthetic construct
  source 1..20: mol_type = other RNA
tcaactcatacctctcttct

SEQ ID NO: 6119 - RNA, 20 nt, synthetic construct
  source 1..20: mol_type = other RNA
tccataagtgatttagacca

SEQ ID NO: 6120 - RNA, 20 nt, synthetic construct
  source 1..20: mol_type = other RNA
cttatggaggattttcagtg

SEQ ID NO: 6121 - RNA, 20 nt, synthetic construct
  source 1..20: mol_type = other RNA
actggaaaaacctttcagcg

SEQ ID NO: 6122 - RNA, 20 nt, synthetic construct
  source 1..20: mol_type = other RNA
gagatgaaaggtcaaaaatg

SEQ ID NO: 6123 - RNA, 20 nt, synthetic construct
  source 1..20: mol_type = other RNA
cagatgtcagaacattactg

SEQ ID NO: 6124 - RNA, 20 nt, synthetic construct
  source 1..20: mol_type = other RNA
gaggtgacaaataagccccc

SEQ ID NO: 6125 - RNA, 20 nt, synthetic construct
  source 1..20: mol_type = other RNA
aatggtagaaactgtgaacc

SEQ ID NO: 6126 - RNA, 20 nt, synthetic construct
  source 1..20: mol_type = other RNA
caagtagggtacaagtctac

SEQ ID NO: 6127 - RNA, 20 nt, synthetic construct
  source 1..20: mol_type = other RNA
cataaagcgattcaagacct

SEQ ID NO: 6128 - RNA, 20 nt, synthetic construct
  source 1..20: mol_type = other RNA
ctttatgtgatggaaggtct

SEQ ID NO: 6129 - RNA, 20 nt, synthetic construct
  source 1..20: mol_type = other RNA
tcatccctaccttttcccct

SEQ ID NO: 6130 - RNA, 20 nt, synthetic construct
  source 1..20: mol_type = other RNA
tccctaccttttcccctatg

SEQ ID NO: 6131 - RNA, 20 nt, synthetic construct
  source 1..20: mol_type = other RNA
ctaccttttcccctatgaag

SEQ ID NO: 6132 - RNA, 20 nt, synthetic construct
  source 1..20: mol_type = other RNA
tgtgtgcattaaatttgtcc

SEQ ID NO: 6133 - RNA, 20 nt, synthetic construct
  source 1..20: mol_type = other RNA
gaaaacactttaaggtcagt

SEQ ID NO: 6134 - RNA, 20 nt, synthetic construct
  source 1..20: mol_type = other RNA
ctagaactgaatatggagac

SEQ ID NO: 6135 - RNA, 20 nt, synthetic construct
  source 1..20: mol_type = other RNA
tgtcaggaaaaatctctaga

SEQ ID NO: 6136 - RNA, 20 nt, synthetic construct
  source 1..20: mol_type = other RNA
ataatagcacatcttgtcag

SEQ ID NO: 6137 - RNA, 20 nt, synthetic construct
  source 1..20: mol_type = other RNA
ggtgtcctgcagctaaggag

SEQ ID NO: 6138 - RNA, 20 nt, synthetic construct
  source 1..20: mol_type = other RNA
cctcggtcatcaggtgtcct

SEQ ID NO: 6139 - RNA, 20 nt, synthetic construct
  source 1..20: mol_type = other RNA
caaatataaagacaactgaa

SEQ ID NO: 6140 - RNA, 20 nt, synthetic construct
  source 1..20: mol_type = other RNA
tctgaaactgaaactctgga

SEQ ID NO: 6141 - RNA, 20 nt, synthetic construct
  source 1..20: mol_type = other RNA
ccagaactcttttcatcttc

SEQ ID NO: 6142 - RNA, 20 nt, synthetic construct
  source 1..20: mol_type = other RNA
atctccagaactcttttcat

SEQ ID NO: 6143 - RNA, 20 nt, synthetic construct
  source 1..20: mol_type = other RNA
ccaccatccatctccagaac

SEQ ID NO: 6144 - RNA, 20 nt, synthetic construct
  source 1..20: mol_type = other RNA
gtgtgaatgtacttaaagtc

SEQ ID NO: 6145 - RNA, 20 nt, synthetic construct
  source 1..20: mol_type = other RNA
gcctgtgttcaagttttcac

SEQ ID NO: 6146 - RNA, 20 nt, synthetic construct
  source 1..20: mol_type = other RNA
tgggtagtttaagtgacatg

SEQ ID NO: 6147 - RNA, 20 nt, synthetic construct
  source 1..20: mol_type = other RNA
ttgtaacaacttcatgaggt

SEQ ID NO: 6148 - RNA, 20 nt, synthetic construct
  source 1..20: mol_type = other RNA
tatttcatctttgtaacaac

SEQ ID NO: 6149 - RNA, 20 nt, synthetic construct
  source 1..20: mol_type = other RNA
tgtcacctgtagctcctgag

SEQ ID NO: 6150 - RNA, 20 nt, synthetic construct
  source 1..20: mol_type = other RNA
gccctgattcctgcctttct

SEQ ID NO: 6151 - RNA, 20 nt, synthetic construct
  source 1..20: mol_type = other RNA
gggcagatatggaggcttta

SEQ ID NO: 6152 - RNA, 20 nt, synthetic construct
  source 1..20: mol_type = other RNA
ggccttatgtcagaaaggca

SEQ ID NO: 6153 - RNA, 20 nt, synthetic construct
  source 1..20: mol_type = other RNA
cagaaaagctcacccatcag

SEQ ID NO: 6154 - RNA, 20 nt, synthetic construct
  source 1..20: mol_type = other RNA
ttatagaatcccagaaaagc

SEQ ID NO: 6155 - RNA, 20 nt, synthetic construct
  source 1..20: mol_type = other RNA
gtcactcttttaatacttcc

SEQ ID NO: 6156 - RNA, 20 nt, synthetic construct
  source 1..20: mol_type = other RNA
caaaaaaatatgaggggaag

SEQ ID NO: 6157 - RNA, 20 nt, synthetic construct
  source 1..20: mol_type = other RNA
tgcaaataggtttctgtacc

SEQ ID NO: 6158 - RNA, 20 nt, synthetic construct
  source 1..20: mol_type = other RNA
gactcagtcagggcctgctt

SEQ ID NO: 6159 - RNA, 20 nt, synthetic construct
  source 1..20: mol_type = other RNA
aaaccgggcacatgttcccc

SEQ ID NO: 6160 - RNA, 20 nt, synthetic construct
  source 1..20: mol_type = other RNA
tgtggacagtagtcgctgct

SEQ ID NO: 6161 - RNA, 20 nt, synthetic construct
  source 1..20: mol_type = other RNA
aagctgagggaagagaaaag

SEQ ID NO: 6162 - RNA, 20 nt, synthetic construct
  source 1..20: mol_type = other RNA
acaaactattttaataaaca

SEQ ID NO: 6163 - RNA, 20 nt, synthetic construct
  source 1..20: mol_type = other RNA
gtttattaaaatagtttgtc

SEQ ID NO: 6164 - RNA, 20 nt, synthetic construct
  source 1..20: mol_type = other RNA
ctaaattctaatgggtggaa

SEQ ID NO: 6165 - RNA, 20 nt, synthetic construct
  source 1..20: mol_type = other RNA
ggcagtaaaaagttttgttc

SEQ ID NO: 6166 - RNA, 20 nt, synthetic construct
  source 1..20: mol_type = other RNA
tattactgagagtagttcta

SEQ ID NO: 6167 - RNA, 20 nt, synthetic construct
  source 1..20: mol_type = other RNA
aaaagtactagaactactct

SEQ ID NO: 6168 - RNA, 20 nt, synthetic construct
  source 1..20: mol_type = other RNA
atctaaaagtactagaacta

SEQ ID NO: 6169 - RNA, 20 nt, synthetic construct
  source 1..20: mol_type = other RNA
taaaatttcatttatcaatc

SEQ ID NO: 6170 - RNA, 20 nt, synthetic construct
  source 1..20: mol_type = other RNA
cctgctctatgttttaggga

SEQ ID NO: 6171 - RNA, 20 nt, synthetic construct
  source 1..20: mol_type = other RNA
ctaaaacatagagcaggtga

SEQ ID NO: 6172 - RNA, 20 nt, synthetic construct
  source 1..20: mol_type = other RNA
ctgcactttgggaggcaaag

SEQ ID NO: 6173 - RNA, 20 nt, synthetic construct
  source 1..20: mol_type = other RNA
acccgcctttgcctcccaaa

SEQ ID NO: 6174 - RNA, 20 nt, synthetic construct
  source 1..20: mol_type = other RNA
cttgaggtcaggagtttgag

SEQ ID NO: 6175 - RNA, 20 nt, synthetic construct
  source 1..20: mol_type = other RNA
tgttgctcaggctggtctca

SEQ ID NO: 6176 - RNA, 20 nt, synthetic construct
  source 1..20: mol_type = other RNA
cacctacttgggaggctgag

SEQ ID NO: 6177 - RNA, 20 nt, synthetic construct
  source 1..20: mol_type = other RNA
tcccacctcagcctcccaag

SEQ ID NO: 6178 - RNA, 20 nt, synthetic construct
  source 1..20: mol_type = other RNA
cttgagcttgtggggcagag

SEQ ID NO: 6179 - RNA, 20 nt, synthetic construct
  source 1..20: mol_type = other RNA
cagctcactgcaaactctgc

SEQ ID NO: 6180 - RNA, 20 nt, synthetic construct
  source 1..20: mol_type = other RNA
tgccactgcactctagactg

SEQ ID NO: 6181 - RNA, 20 nt, synthetic construct
  source 1..20: mol_type = other RNA
tttttctacaacagaaaaag

SEQ ID NO: 6182 - RNA, 20 nt, synthetic construct
  source 1..20: mol_type = other RNA
cttaatacatagcaaaatct

SEQ ID NO: 6183 - RNA, 20 nt, synthetic construct
  source 1..20: mol_type = other RNA
aaaatgattcagattaagtg

SEQ ID NO: 6184 - RNA, 20 nt, synthetic construct
  source 1..20: mol_type = other RNA
ttttagattttgctatgtat

SEQ ID NO: 6185 - RNA, 20 nt, synthetic construct
  source 1..20: mol_type = other RNA
gaatcattttagattttgct

SEQ ID NO: 6186 - RNA, 20 nt, synthetic construct
  source 1..20: mol_type = other RNA
tgcgtctcaggttttggttt

SEQ ID NO: 6187 - RNA, 20 nt, synthetic construct
  source 1..20: mol_type = other RNA
gggagtggccgttagcttgt

SEQ ID NO: 6188 - RNA, 20 nt, synthetic construct
  source 1..20: mol_type = other RNA
tgccttatctggtaaaagaa

SEQ ID NO: 6189 - RNA, 20 nt, synthetic construct
  source 1..20: mol_type = other RNA
ggtaaaagaatcccaagcta

SEQ ID NO: 6190 - RNA, 20 nt, synthetic construct
  source 1..20: mol_type = other RNA
caagctacaccttcctgact

SEQ ID NO: 6191 - RNA, 20 nt, synthetic construct
  source 1..20: mol_type = other RNA
tctcaccctacacatttctc

SEQ ID NO: 6192 - RNA, 20 nt, synthetic construct
  source 1..20: mol_type = other RNA
ctgggttttaatttttctga

SEQ ID NO: 6193 - RNA, 20 nt, synthetic construct
  source 1..20: mol_type = other RNA
gtcactgtagatcccaccga

SEQ ID NO: 6194 - RNA, 20 nt, synthetic construct
  source 1..20: mol_type = other RNA
acagtgactgatacagtaga

SEQ ID NO: 6195 - RNA, 20 nt, synthetic construct
  source 1..20: mol_type = other RNA
caccgagagtagcaggaggc

SEQ ID NO: 6196 - RNA, 20 nt, synthetic construct
  source 1..20: mol_type = other RNA
attgttctggccagttctgc

SEQ ID NO: 6197 - RNA, 20 nt, synthetic construct
  source 1..20: mol_type = other RNA
acatatttactatagacatt

SEQ ID NO: 6198 - RNA, 20 nt, synthetic construct
  source 1..20: mol_type = other RNA
attttctgtctcaaacacaa

SEQ ID NO: 6199 - RNA, 20 nt, synthetic construct
  source 1..20: mol_type = other RNA
tatacaagtagagcgagtca

SEQ ID NO: 6200 - RNA, 20 nt, synthetic construct
  source 1..20: mol_type = other RNA
tcaataacctgggaaaggaa

SEQ ID NO: 6201 - RNA, 20 nt, synthetic construct
  source 1..20: mol_type = other RNA
cttgggtagaattataaaga

SEQ ID NO: 6202 - RNA, 20 nt, synthetic construct
  source 1..20: mol_type = other RNA
cagcactttgcaaggccaag

SEQ ID NO: 6203 - RNA, 20 nt, synthetic construct
  source 1..20: mol_type = other RNA
tcctgccttggccttgcaaa

SEQ ID NO: 6204 - RNA, 20 nt, synthetic construct
  source 1..20: mol_type = other RNA
cttgaggccaggagttctga

SEQ ID NO: 6205 - RNA, 20 nt, synthetic construct
  source 1..20: mol_type = other RNA
tgctttgttgcccaggctag

SEQ ID NO: 6206 - RNA, 20 nt, synthetic construct
  source 1..20: mol_type = other RNA
catctctaaaaaataaaaaa

SEQ ID NO: 6207 - RNA, 20 nt, synthetic construct
  source 1..20: mol_type = other RNA
ctaaaaaataaaaaaagaaa

SEQ ID NO: 6208 - RNA, 20 nt, synthetic construct
  source 1..20: mol_type = other RNA
ttttgcctcagcctcctgta

SEQ ID NO: 6209 - RNA, 20 nt, synthetic construct
  source 1..20: mol_type = other RNA
tttgtgcctaggactttgag

SEQ ID NO: 6210 - RNA, 20 nt, synthetic construct
  source 1..20: mol_type = other RNA
caaatatatcttaaaactaa

SEQ ID NO: 6211 - RNA, 20 nt, synthetic construct
  source 1..20: mol_type = other RNA
taaaactaagagaaaaaact

SEQ ID NO: 6212 - RNA, 20 nt, synthetic construct
  source 1..20: mol_type = other RNA
atgtgttgctatcaactaga

SEQ ID NO: 6213 - RNA, 20 nt, synthetic construct
  source 1..20: mol_type = other RNA
actagatctatagttctctg

SEQ ID NO: 6214 - RNA, 20 nt, synthetic construct
  source 1..20: mol_type = other RNA
agttgatagcaacacataga

SEQ ID NO: 6215 - RNA, 20 nt, synthetic construct
  source 1..20: mol_type = other RNA
atagttctctgtgggttatg

SEQ ID NO: 6216 - RNA, 20 nt, synthetic construct
  source 1..20: mol_type = other RNA
taaagtatatgtcctcataa

SEQ ID NO: 6217 - RNA, 20 nt, synthetic construct
  source 1..20: mol_type = other RNA
taaggataagaggtttatgc

SEQ ID NO: 6218 - RNA, 20 nt, synthetic construct
  source 1..20: mol_type = other RNA
ttaggatcataaagtatatg

SEQ ID NO: 6219 - RNA, 20 nt, synthetic construct
  source 1..20: mol_type = other RNA
tagctgtatttctagttctt

SEQ ID NO: 6220 - RNA, 20 nt, synthetic construct
  source 1..20: mol_type = other RNA
acaacaaacccatatagttt

SEQ ID NO: 6221 - RNA, 20 nt, synthetic construct
  source 1..20: mol_type = other RNA
atcaacaacaaacccatata

SEQ ID NO: 6222 - RNA, 20 nt, synthetic construct
  source 1..20: mol_type = other RNA
ctaaggagcaataatctgcc

SEQ ID NO: 6223 - RNA, 20 nt, synthetic construct
  source 1..20: mol_type = other RNA
gccaaagtctgtaaaagcac

SEQ ID NO: 6224 - RNA, 20 nt, synthetic construct
  source 1..20: mol_type = other RNA
atgatgtcttttcttactca

SEQ ID NO: 6225 - RNA, 20 nt, synthetic construct
  source 1..20: mol_type = other RNA
tagatgccatttgttaaaag

SEQ ID NO: 6226 - RNA, 20 nt, synthetic construct
  source 1..20: mol_type = other RNA
tttaataaagagttttgagt

SEQ ID NO: 6227 - RNA, 20 nt, synthetic construct
  source 1..20: mol_type = other RNA
agaattcgaagggaacccag

SEQ ID NO: 6228 - RNA, 20 nt, synthetic construct
  source 1..20: mol_type = other RNA
ttggaatttggtgactggtt

SEQ ID NO: 6229 - RNA, 20 nt, synthetic construct
  source 1..20: mol_type = other RNA
agaggtattgtggaaagaga

SEQ ID NO: 6230 - RNA, 20 nt, synthetic construct
  source 1..20: mol_type = other RNA
gtctgtcccttgccccacca

SEQ ID NO: 6231 - RNA, 20 nt, synthetic construct
  source 1..20: mol_type = other RNA
tgcatccttctttactccat

SEQ ID NO: 6232 - RNA, 20 nt, synthetic construct
  source 1..20: mol_type = other RNA
ttctttactccatccttcaa

SEQ ID NO: 6233 - RNA, 20 nt, synthetic construct
  source 1..20: mol_type = other RNA
ttcaatacaactgccagagg

SEQ ID NO: 6234 - RNA, 20 nt, synthetic construct
  source 1..20: mol_type = other RNA
tctggcagttgtattgaagg

SEQ ID NO: 6235 - RNA, 20 nt, synthetic construct
  source 1..20: mol_type = other RNA
tacaattgattacatttcag

SEQ ID NO: 6236 - RNA, 20 nt, synthetic construct
  source 1..20: mol_type = other RNA
attgtaggattctttccact

SEQ ID NO: 6237 - RNA, 20 nt, synthetic construct
  source 1..20: mol_type = other RNA
tagacactattgactgtatg

SEQ ID NO: 6238 - RNA, 20 nt, synthetic construct
  source 1..20: mol_type = other RNA
aatcttagacactattgact

SEQ ID NO: 6239 - RNA, 20 nt, synthetic construct
  source 1..20: mol_type = other RNA
tttgcgctaacacgatgcct

SEQ ID NO: 6240 - RNA, 20 nt, synthetic construct
  source 1..20: mol_type = other RNA
tgttagcgcaaatgatatta

SEQ ID NO: 6241 - RNA, 20 nt, synthetic construct
  source 1..20: mol_type = other RNA
ctatcactccccttcagtcc

SEQ ID NO: 6242 - RNA, 20 nt, synthetic construct
  source 1..20: mol_type = other RNA
ctccccttcagtcccctgca

SEQ ID NO: 6243 - RNA, 20 nt, synthetic construct
  source 1..20: mol_type = other RNA
tcgtgtcagtcatgtgtcta

SEQ ID NO: 6244 - RNA, 20 nt, synthetic construct
  source 1..20: mol_type = other RNA
agcattgttaattgccattc

SEQ ID NO: 6245 - RNA, 20 nt, synthetic construct
  source 1..20: mol_type = other RNA
acgttctagctctatcacct

SEQ ID NO: 6246 - RNA, 20 nt, synthetic construct
  source 1..20: mol_type = other RNA
ccttctggccgaccctggac

SEQ ID NO: 6247 - RNA, 20 nt, synthetic construct
  source 1..20: mol_type = other RNA
gagtgttgcagctggaagaa

SEQ ID NO: 6248 - RNA, 20 nt, synthetic construct
  source 1..20: mol_type = other RNA
cccctactctttcttttctt

SEQ ID NO: 6249 - RNA, 20 nt, synthetic construct
  source 1..20: mol_type = other RNA
gtttagtgacttgaaatctc

SEQ ID NO: 6250 - RNA, 20 nt, synthetic construct
  source 1..20: mol_type = other RNA
gattttatatatgtccatat

SEQ ID NO: 6251 - RNA, 20 nt, synthetic construct
  source 1..20: mol_type = other RNA
gatctgtttagtgacttgaa

SEQ ID NO: 6252 - RNA, 20 nt, synthetic construct
  source 1..20: mol_type = other RNA
tagtttgttttccagaagat

SEQ ID NO: 6253 - RNA, 20 nt, synthetic construct
  source 1..20: mol_type = other RNA
tctggaaaacaaactaggat

SEQ ID NO: 6254 - RNA, 20 nt, synthetic construct
  source 1..20: mol_type = other RNA
ttaactcagagtattcccat

SEQ ID NO: 6255 - RNA, 20 nt, synthetic construct
  source 1..20: mol_type = other RNA
tggcacatttttctatttta

SEQ ID NO: 6256 - RNA, 20 nt, synthetic construct
  source 1..20: mol_type = other RNA
tcacaacctgtgaagtcagt

SEQ ID NO: 6257 - RNA, 20 nt, synthetic construct
  source 1..20: mol_type = other RNA
cctctgatataggtctgtag

SEQ ID NO: 6258 - RNA, 20 nt, synthetic construct
  source 1..20: mol_type = other RNA
gaggagattaagttcctctc

SEQ ID NO: 6259 - RNA, 20 nt, synthetic construct
  source 1..20: mol_type = other RNA
actaatcacctgcttcttgt

SEQ ID NO: 6260 - RNA, 20 nt, synthetic construct
  source 1..20: mol_type = other RNA
cctgcttcttgttaacacta

SEQ ID NO: 6261 - RNA, 20 nt, synthetic construct
  source 1..20: mol_type = other RNA
ccactataaatactggtgca

SEQ ID NO: 6262 - RNA, 20 nt, synthetic construct
  source 1..20: mol_type = other RNA
atgtaacagtgttggtccct

SEQ ID NO: 6263 - RNA, 20 nt, synthetic construct
  source 1..20: mol_type = other RNA
ttgctcacgctaccccaggg

SEQ ID NO: 6264 - RNA, 20 nt, synthetic construct
  source 1..20: mol_type = other RNA
ccagtcatccttgctcacgc

SEQ ID NO: 6265 - RNA, 20 nt, synthetic construct
  source 1..20: mol_type = other RNA
atgtaattaaaaattaaaga

SEQ ID NO: 6266 - RNA, 20 nt, synthetic construct
  source 1..20: mol_type = other RNA
ttaatttttaattacatgga

SEQ ID NO: 6267 - RNA, 20 nt, synthetic construct
  source 1..20: mol_type = other RNA
ttctagtataggctcagttt

SEQ ID NO: 6268 - RNA, 20 nt, synthetic construct
  source 1..20: mol_type = other RNA
ttttgctccaaggcagtatg

SEQ ID NO: 6269 - RNA, 20 nt, synthetic construct
  source 1..20: mol_type = other RNA
ggctatcactcgtttaactg

SEQ ID NO: 6270 - RNA, 20 nt, synthetic construct
  source 1..20: mol_type = other RNA
ctcgtttaactgaggtctta

SEQ ID NO: 6271 - RNA, 20 nt, synthetic construct
  source 1..20: mol_type = other RNA
caatgagtgccaagagcgag

SEQ ID NO: 6272 - RNA, 20 nt, synthetic construct
  source 1..20: mol_type = other RNA
gttgttgctgcctttaactg

SEQ ID NO: 6273 - RNA, 20 nt, synthetic construct
  source 1..20: mol_type = other RNA
acccagattttaagataatt

SEQ ID NO: 6274 - RNA, 20 nt, synthetic construct
  source 1..20: mol_type = other RNA
gggtagatttcagttaaagg

SEQ ID NO: 6275 - RNA, 20 nt, synthetic construct
  source 1..20: mol_type = other RNA
taaaatctgggtagatttca

SEQ ID NO: 6276 - RNA, 20 nt, synthetic construct
  source 1..20: mol_type = other RNA
atagacttctaacagttaag

SEQ ID NO: 6277 - RNA, 20 nt, synthetic construct
  source 1..20: mol_type = other RNA
gtttttcaaaggcaaaagct

SEQ ID NO: 6278 - RNA, 20 nt, synthetic construct
  source 1..20: mol_type = other RNA
ccaacagatccaaaaaatat

SEQ ID NO: 6279 - RNA, 20 nt, synthetic construct
  source 1..20: mol_type = other RNA
gttggtgattattttaattg

SEQ ID NO: 6280 - RNA, 20 nt, synthetic construct
  source 1..20: mol_type = other RNA
aaaaaatattaagcaaaaaa

SEQ ID NO: 6281 - RNA, 20 nt, synthetic construct
  source 1..20: mol_type = other RNA
tttttttttttttttgctta

SEQ ID NO: 6282 - RNA, 20 nt, synthetic construct
  source 1..20: mol_type = other RNA
atgaacaatataattctggt

SEQ ID NO: 6283 - RNA, 20 nt, synthetic construct
  source 1..20: mol_type = other RNA
gtaaatcaggtagggaagaa

SEQ ID NO: 6284 - RNA, 20 nt, synthetic construct
  source 1..20: mol_type = other RNA
ggtagggaagaaggactgga

SEQ ID NO: 6285 - RNA, 20 nt, synthetic construct
  source 1..20: mol_type = other RNA
tccagtccttcttccctacc

SEQ ID NO: 6286 - RNA, 20 nt, synthetic construct
  source 1..20: mol_type = other RNA
aaccttccccttccagcaga

SEQ ID NO: 6287 - RNA, 20 nt, synthetic construct
  source 1..20: mol_type = other RNA
tcaatccaaccttccccttc

SEQ ID NO: 6288 - RNA, 20 nt, synthetic construct
  source 1..20: mol_type = other RNA
tggtgcctgtgtggctcatc

SEQ ID NO: 6289 - RNA, 20 nt, synthetic construct
  source 1..20: mol_type = other RNA
cttttgtgtgttcctggtcc

SEQ ID NO: 6290 - RNA, 20 nt, synthetic construct
  source 1..20: mol_type = other RNA
ccaatctcttttgtgtgttc

SEQ ID NO: 6291 - RNA, 20 nt, synthetic construct
  source 1..20: mol_type = other RNA
tttcgttaattgtagagggt

SEQ ID NO: 6292 - RNA, 20 nt, synthetic construct
  source 1..20: mol_type = other RNA
aaatcatttcgttaattgta

SEQ ID NO: 6293 - RNA, 20 nt, synthetic construct
  source 1..20: mol_type = other RNA
atcaaaatcatttcgttaat

SEQ ID NO: 6294 - RNA, 20 nt, synthetic construct
  source 1..20: mol_type = other RNA
gggccccagagggaggtaaa

SEQ ID NO: 6295 - RNA, 20 nt, synthetic construct
  source 1..20: mol_type = other RNA
ataagaaaatgtgcctcctt

SEQ ID NO: 6296 - RNA, 20 nt, synthetic construct
  source 1..20: mol_type = other RNA
gctgtgtgagtactcagtgt

SEQ ID NO: 6297 - RNA, 20 nt, synthetic construct
  source 1..20: mol_type = other RNA
ctcacagtctaggggggata

SEQ ID NO: 6298 - RNA, 20 nt, synthetic construct
  source 1..20: mol_type = other RNA
cccctagactgtgagggatc

SEQ ID NO: 6299 - RNA, 20 nt, synthetic construct
  source 1..20: mol_type = other RNA
ctaggtatcccccctagact

SEQ ID NO: 6300 - RNA, 20 nt, synthetic construct
  source 1..20: mol_type = other RNA
ttcaaagaggtaaaaatata

SEQ ID NO: 6301 - RNA, 20 nt, synthetic construct
  source 1..20: mol_type = other RNA
tcagtggcagctttcggcag

SEQ ID NO: 6302 - RNA, 20 nt, synthetic construct
  source 1..20: mol_type = other RNA
acccatatagaaggagttat

SEQ ID NO: 6303 - RNA, 20 nt, synthetic construct
  source 1..20: mol_type = other RNA
aaaaagacaaagctacctaa

SEQ ID NO: 6304 - RNA, 20 nt, synthetic construct
  source 1..20: mol_type = other RNA
gaaggatgctctgtgttttt

SEQ ID NO: 6305 - RNA, 20 nt, synthetic construct
  source 1..20: mol_type = other RNA
ttctgatagagaaatgctta

SEQ ID NO: 6306 - RNA, 20 nt, synthetic construct
  source 1..20: mol_type = other RNA
aatggcaggaaactaaataa

SEQ ID NO: 6307 - RNA, 20 nt, synthetic construct
  source 1..20: mol_type = other RNA
tcctagtagcttctgggtct

SEQ ID NO: 6308 - RNA, 20 nt, synthetic construct
  source 1..20: mol_type = other RNA
atagacaggatgaatactcc

SEQ ID NO: 6309 - RNA, 20 nt, synthetic construct
  source 1..20: mol_type = other RNA
tgtctatggatgcaaaaact

SEQ ID NO: 6310 - RNA, 20 nt, synthetic construct
  source 1..20: mol_type = other RNA
ccgtaacaaacctatgagga

SEQ ID NO: 6311 - RNA, 20 nt, synthetic construct
  source 1..20: mol_type = other RNA
aacacagtaagtttaaagca

SEQ ID NO: 6312 - RNA, 20 nt, synthetic construct
  source 1..20: mol_type = other RNA
tgacaagacccaggaagagt

SEQ ID NO: 6313 - RNA, 20 nt, synthetic construct
  source 1..20: mol_type = other RNA
agtgtcctaacttatgtgtg

SEQ ID NO: 6314 - RNA, 20 nt, synthetic construct
  source 1..20: mol_type = other RNA
tataggacaatttgtggttt

SEQ ID NO: 6315 - RNA, 20 nt, synthetic construct
  source 1..20: mol_type = other RNA
aatacagcaaaaccacaaat

SEQ ID NO: 6316 - RNA, 20 nt, synthetic construct
  source 1..20: mol_type = other RNA
tccaatacagcaaaaccaca

SEQ ID NO: 6317 - RNA, 20 nt, synthetic construct
  source 1..20: mol_type = other RNA
tacattcaaatatatttcaa

SEQ ID NO: 6318 - RNA, 20 nt, synthetic construct
  source 1..20: mol_type = other RNA
ttgaaatatatttgaatgta

SEQ ID NO: 6319 - RNA, 20 nt, synthetic construct
  source 1..20: mol_type = other RNA
gcatcccctttgtttttaca

SEQ ID NO: 6320 - RNA, 20 nt, synthetic construct
  source 1..20: mol_type = other RNA
cctttgtttttacaaagtac

SEQ ID NO: 6321 - RNA, 20 nt, synthetic construct
  source 1..20: mol_type = other RNA
cattatctcattatacctgg

SEQ ID NO: 6322 - RNA, 20 nt, synthetic construct
  source 1..20: mol_type = other RNA
cattatacctggggaattat

SEQ ID NO: 6323 - RNA, 20 nt, synthetic construct
  source 1..20: mol_type = other RNA
tcagtgcaaaatgaaaatac

SEQ ID NO: 6324 - RNA, 20 nt, synthetic construct
  source 1..20: mol_type = other RNA
gaacggtcaggttcacgaaa

SEQ ID NO: 6325 - RNA, 20 nt, synthetic construct
  source 1..20: mol_type = other RNA
ccttaatttgaaccactact

SEQ ID NO: 6326 - RNA, 20 nt, synthetic construct
  source 1..20: mol_type = other RNA
taaagagttgttttaaaaaa

SEQ ID NO: 6327 - RNA, 20 nt, synthetic construct
  source 1..20: mol_type = other RNA
ttcatttgggagaggtgaga

SEQ ID NO: 6328 - RNA, 20 nt, synthetic construct
  source 1..20: mol_type = other RNA
cttcattctaagatatgtta

SEQ ID NO: 6329 - RNA, 20 nt, synthetic construct
  source 1..20: mol_type = other RNA
tagaatgaagagatactgaa

SEQ ID NO: 6330 - RNA, 20 nt, synthetic construct
  source 1..20: mol_type = other RNA
caaaggaatgttggtaagct

SEQ ID NO: 6331 - RNA, 20 nt, synthetic construct
  source 1..20: mol_type = other RNA
gaatgcaaaacaagtaacgc

SEQ ID NO: 6332 - RNA, 20 nt, synthetic construct
  source 1..20: mol_type = other RNA
tcacaatacagtggcgttac

SEQ ID NO: 6333 - RNA, 20 nt, synthetic construct
  source 1..20: mol_type = other RNA
acgtatctgtcatcagggaa

SEQ ID NO: 6334 - RNA, 20 nt, synthetic construct
  source 1..20: mol_type = other RNA
gtcatcagggaagataaagt

SEQ ID NO: 6335 - RNA, 20 nt, synthetic construct
  source 1..20: mol_type = other RNA
gggaagataaagtggctgtt

SEQ ID NO: 6336 - RNA, 20 nt, synthetic construct
  source 1..20: mol_type = other RNA
tccctgatgacagatacgtc

SEQ ID NO: 6337 - RNA, 20 nt, synthetic construct
  source 1..20: mol_type = other RNA
caggttttaagccagctcaa

SEQ ID NO: 6338 - RNA, 20 nt, synthetic construct
  source 1..20: mol_type = other RNA
ataaagggactggttttaga

SEQ ID NO: 6339 - RNA, 20 nt, synthetic construct
  source 1..20: mol_type = other RNA
ccagcctcagagtttttccc

SEQ ID NO: 6340 - RNA, 20 nt, synthetic construct
  source 1..20: mol_type = other RNA
gcaggtctggccctgcctct

SEQ ID NO: 6341 - RNA, 20 nt, synthetic construct
  source 1..20: mol_type = other RNA
tgagttcttcatgtactggc

SEQ ID NO: 6342 - RNA, 20 nt, synthetic construct
  source 1..20: mol_type = other RNA
caaagtaggcagaataggga

SEQ ID NO: 6343 - RNA, 20 nt, synthetic construct
  source 1..20: mol_type = other RNA
aaggccccattgtcactagc

SEQ ID NO: 6344 - RNA, 20 nt, synthetic construct
  source 1..20: mol_type = other RNA
cttttccacttcaaactctt

SEQ ID NO: 6345 - RNA, 20 nt, synthetic construct
  source 1..20: mol_type = other RNA
acacacagagcacgtgatgc

SEQ ID NO: 6346 - RNA, 20 nt, synthetic construct
  source 1..20: mol_type = other RNA
cgtgctctgtgtgtggatac

SEQ ID NO: 6347 - RNA, 20 nt, synthetic construct
  source 1..20: mol_type = other RNA
gtctcccttagcaggaaagg

SEQ ID NO: 6348 - RNA, 20 nt, synthetic construct
  source 1..20: mol_type = other RNA
ctgctccaccaatgcattag

SEQ ID NO: 6349 - RNA, 20 nt, synthetic construct
  source 1..20: mol_type = other RNA
ctgagctttactccttgcct

SEQ ID NO: 6350 - RNA, 20 nt, synthetic construct
  source 1..20: mol_type = other RNA
ccattctcaggcaaggagta

SEQ ID NO: 6351 - RNA, 20 nt, synthetic construct
  source 1..20: mol_type = other RNA
aaattaagcagcttcatccc

SEQ ID NO: 6352 - RNA, 20 nt, synthetic construct
  source 1..20: mol_type = other RNA
aaagtataccacaataaagt

SEQ ID NO: 6353 - RNA, 20 nt, synthetic construct
  source 1..20: mol_type = other RNA
agtacataataagtactcca

SEQ ID NO: 6354 - RNA, 20 nt, synthetic construct
  source 1..20: mol_type = other RNA
atcaaataaaagaaatacga

SEQ ID NO: 6355 - RNA, 20 nt, synthetic construct
  source 1..20: mol_type = other RNA
aataaaagaaatacgatgga

SEQ ID NO: 6356 - RNA, 20 nt, synthetic construct
  source 1..20: mol_type = other RNA
tatttcttttatttgataga

SEQ ID NO: 6357 - RNA, 20 nt, synthetic construct
  source 1..20: mol_type = other RNA
atcgtatttcttttatttga

SEQ ID NO: 6358 - RNA, 20 nt, synthetic construct
  source 1..20: mol_type = other RNA
gcccacctcggcttaccgag

SEQ ID NO: 6359 - RNA, 20 nt, synthetic construct
  source 1..20: mol_type = other RNA
cttgagcccaggagtttgag

SEQ ID NO: 6360 - RNA, 20 nt, synthetic construct
  source 1..20: mol_type = other RNA
tgtttctatacaaaatacaa

SEQ ID NO: 6361 - RNA, 20 nt, synthetic construct
  source 1..20: mol_type = other RNA
tccctcctcagccccctggt

SEQ ID NO: 6362 - RNA, 20 nt, synthetic construct
  source 1..20: mol_type = other RNA
ctgaaacccagaaggtctag

SEQ ID NO: 6363 - RNA, 20 nt, synthetic construct
  source 1..20: mol_type = other RNA
ggggtcactgcagcctagac

SEQ ID NO: 6364 - RNA, 20 nt, synthetic construct
  source 1..20: mol_type = other RNA
gggtgacagcaaacctggtg

SEQ ID NO: 6365 - RNA, 20 nt, synthetic construct
  source 1..20: mol_type = other RNA
gcactatcattcagtttata

SEQ ID NO: 6366 - RNA, 20 nt, synthetic construct
  source 1..20: mol_type = other RNA
ttcagtttataacagcacaa

SEQ ID NO: 6367 - RNA, 20 nt, synthetic construct
  source 1..20: mol_type = other RNA
aaatgcaaagttgtgctgtt

SEQ ID NO: 6368 - RNA, 20 nt, synthetic construct
  source 1..20: mol_type = other RNA
gacttaaaagaaccaccacc

SEQ ID NO: 6369 - RNA, 20 nt, synthetic construct
  source 1..20: mol_type = other RNA
acctttccctcttatgactt

SEQ ID NO: 6370 - RNA, 20 nt, synthetic construct
  source 1..20: mol_type = other RNA
ttacaacttcttcatacaat

SEQ ID NO: 6371 - RNA, 20 nt, synthetic construct
  source 1..20: mol_type = other RNA
cctacaaaaagaaacacagc

SEQ ID NO: 6372 - RNA, 20 nt, synthetic construct
  source 1..20: mol_type = other RNA
ctagtggaatagctatggtt

SEQ ID NO: 6373 - RNA, 20 nt, synthetic construct
  source 1..20: mol_type = other RNA
ggtaaggactacttttatat

SEQ ID NO: 6374 - RNA, 20 nt, synthetic construct
  source 1..20: mol_type = other RNA
gcttcctcctaggggccagt

SEQ ID NO: 6375 - RNA, 20 nt, synthetic construct
  source 1..20: mol_type = other RNA
tgtgccgcagagctgaatgc

SEQ ID NO: 6376 - RNA, 20 nt, synthetic construct
  source 1..20: mol_type = other RNA
tcttctgaggcattcagctc

SEQ ID NO: 6377 - RNA, 20 nt, synthetic construct
  source 1..20: mol_type = other RNA
ccagccctaattccttgctg

SEQ ID NO: 6378 - RNA, 20 nt, synthetic construct
  source 1..20: mol_type = other RNA
tgtgacagcaaggaattagg

SEQ ID NO: 6379 - RNA, 20 nt, synthetic construct
  source 1..20: mol_type = other RNA
agacaaaaattggttttaaa

SEQ ID NO: 6380 - RNA, 20 nt, synthetic construct
  source 1..20: mol_type = other RNA
aattaaaaaaactcctgagc

SEQ ID NO: 6381 - RNA, 20 nt, synthetic construct
  source 1..20: mol_type = other RNA
atgagtaactatacccacct

SEQ ID NO: 6382 - RNA, 20 nt, synthetic construct
  source 1..20: mol_type = other RNA
gaattcttacaagtaatata

SEQ ID NO: 6383 - RNA, 20 nt, synthetic construct
  source 1..20: mol_type = other RNA
tgtgaattatattacttgta

SEQ ID NO: 6384 - RNA, 20 nt, synthetic construct
  source 1..20: mol_type = other RNA
taaaaaacataccatataga

SEQ ID NO: 6385 - RNA, 20 nt, synthetic construct
  source 1..20: mol_type = other RNA
agtctaaaaattttttagag

SEQ ID NO: 6386 - RNA, 20 nt, synthetic construct
  source 1..20: mol_type = other RNA
tctgtattaggaaaagatat

SEQ ID NO: 6387 - RNA, 20 nt, synthetic construct
  source 1..20: mol_type = other RNA
tttcctaatacagaagattt

SEQ ID NO: 6388 - RNA, 20 nt, synthetic construct
  source 1..20: mol_type = other RNA
gttactggaggtactacttg

SEQ ID NO: 6389 - RNA, 20 nt, synthetic construct
  source 1..20: mol_type = other RNA
ttcctctaaccagttaaaaa

SEQ ID NO: 6390 - RNA, 20 nt, synthetic construct
  source 1..20: mol_type = other RNA
tgttataaatgtctgtctta

SEQ ID NO: 6391 - RNA, 20 nt, synthetic construct
  source 1..20: mol_type = other RNA
gactttccttttgttcttat

SEQ ID NO: 6392 - RNA, 20 nt, synthetic construct
  source 1..20: mol_type = other RNA
agtctcagattcagatggac

SEQ ID NO: 6393 - RNA, 20 nt, synthetic construct
  source 1..20: mol_type = other RNA
gagactggattgtatcagac

SEQ ID NO: 6394 - RNA, 20 nt, synthetic construct
  source 1..20: mol_type = other RNA
gaatctgagactggattgta

SEQ ID NO: 6395 - RNA, 20 nt, synthetic construct
  source 1..20: mol_type = other RNA
attttaccttccagagaaag

SEQ ID NO: 6396 - RNA, 20 nt, synthetic construct
  source 1..20: mol_type = other RNA
ttctctggaaggtaaaatgg

SEQ ID NO: 6397 - RNA, 20 nt, synthetic construct
  source 1..20: mol_type = other RNA
aggaactgaaactaagcttt

SEQ ID NO: 6398 - RNA, 20 nt, synthetic construct
  source 1..20: mol_type = other RNA
attctaccgctgagtcacat

SEQ ID NO: 6399 - RNA, 20 nt, synthetic construct
  source 1..20: mol_type = other RNA
ctctgtctcttaaaaaaagg

SEQ ID NO: 6400 - RNA, 20 nt, synthetic construct
  source 1..20: mol_type = other RNA
ctccctccactacgttactt

SEQ ID NO: 6401 - RNA, 20 nt, synthetic construct
  source 1..20: mol_type = other RNA
cagatgcaaagaataaaaaa

SEQ ID NO: 6402 - RNA, 20 nt, synthetic construct
  source 1..20: mol_type = other RNA
gtgattatgtgaagaagtaa

SEQ ID NO: 6403 - RNA, 20 nt, synthetic construct
  source 1..20: mol_type = other RNA
gcttggtttccagcccctat

SEQ ID NO: 6404 - RNA, 20 nt, synthetic construct
  source 1..20: mol_type = other RNA
atttgctccatcggcttggt

SEQ ID NO: 6405 - RNA, 20 nt, synthetic construct
  source 1..20: mol_type = other RNA
ccgttgtcattctgtcaggc

SEQ ID NO: 6406 - RNA, 20 nt, synthetic construct
  source 1..20: mol_type = other RNA
actcagccgtgaacttactt

SEQ ID NO: 6407 - RNA, 20 nt, synthetic construct
  source 1..20: mol_type = other RNA
gtgatctagatttaagacca

SEQ ID NO: 6408 - RNA, 20 nt, synthetic construct
  source 1..20: mol_type = other RNA
cagatgaatttctagggact

SEQ ID NO: 6409 - RNA, 20 nt, synthetic construct
  source 1..20: mol_type = other RNA
agatttaagaccaggcttac

SEQ ID NO: 6410 - RNA, 20 nt, synthetic construct
  source 1..20: mol_type = other RNA
agatcacagatgaatttcta

SEQ ID NO: 6411 - RNA, 20 nt, synthetic construct
  source 1..20: mol_type = other RNA
tcagaggaaacgaactaatg

SEQ ID NO: 6412 - RNA, 20 nt, synthetic construct
  source 1..20: mol_type = other RNA
atcctgtcacacccattata

SEQ ID NO: 6413 - RNA, 20 nt, synthetic construct
  source 1..20: mol_type = other RNA
tgtcacacccattataaata

SEQ ID NO: 6414 - RNA, 20 nt, synthetic construct
  source 1..20: mol_type = other RNA
tgtaaagtactttgaaaatg

SEQ ID NO: 6415 - RNA, 20 nt, synthetic construct
  source 1..20: mol_type = other RNA
atcagctgggcatcagacag

SEQ ID NO: 6416 - RNA, 20 nt, synthetic construct
  source 1..20: mol_type = other RNA
gctgggcatcagacagaatt

SEQ ID NO: 6417 - RNA, 20 nt, synthetic construct
  source 1..20: mol_type = other RNA
gacagaattcactgagcaaa

SEQ ID NO: 6418 - RNA, 20 nt, synthetic construct
  source 1..20: mol_type = other RNA
ctagggaggctgcactaact

SEQ ID NO: 6419 - RNA, 20 nt, synthetic construct
  source 1..20: mol_type = other RNA
tttgtttgggttggtacatg

SEQ ID NO: 6420 - RNA, 20 nt, synthetic construct
  source 1..20: mol_type = other RNA
gcatttgaagcagtaattcc

SEQ ID NO: 6421 - RNA, 20 nt, synthetic construct
  source 1..20: mol_type = other RNA
gtatttagttcattgaggca

SEQ ID NO: 6422 - RNA, 20 nt, synthetic construct
  source 1..20: mol_type = other RNA
tgggaagtaactgctgtacc

SEQ ID NO: 6423 - RNA, 20 nt, synthetic construct
  source 1..20: mol_type = other RNA
aggggcgttaagtccttaca

SEQ ID NO: 6424 - RNA, 20 nt, synthetic construct
  source 1..20: mol_type = other RNA
caacgcagaccaaagcaggc

SEQ ID NO: 6425 - RNA, 20 nt, synthetic construct
  source 1..20: mol_type = other RNA
caaacaccagggtaggccag

SEQ ID NO: 6426 - RNA, 20 nt, synthetic construct
  source 1..20: mol_type = other RNA
tgataaaacaaggcactgtc

SEQ ID NO: 6427 - RNA, 20 nt, synthetic construct
  source 1..20: mol_type = other RNA
ggataaggtcggtctcattt

SEQ ID NO: 6428 - RNA, 20 nt, synthetic construct
  source 1..20: mol_type = other RNA
tgaaagaaagagaaaggtgg

SEQ ID NO: 6429 - RNA, 20 nt, synthetic construct
  source 1..20: mol_type = other RNA
tgctttttcacaccaccttt

SEQ ID NO: 6430 - RNA, 20 nt, synthetic construct
  source 1..20: mol_type = other RNA
gaaggtaaagttcatctcta

SEQ ID NO: 6431 - RNA, 20 nt, synthetic construct
  source 1..20: mol_type = other RNA
tttcacaataaattttcagc

SEQ ID NO: 6432 - RNA, 20 nt, synthetic construct
  source 1..20: mol_type = other RNA
aaagaattcagactactaac

SEQ ID NO: 6433 - RNA, 20 nt, synthetic construct
  source 1..20: mol_type = other RNA
atctgtaagcaatatttact

SEQ ID NO: 6434 - RNA, 20 nt, synthetic construct
  source 1..20: mol_type = other RNA
gtaagcaatatttactatga

SEQ ID NO: 6435 - RNA, 20 nt, synthetic construct
  source 1..20: mol_type = other RNA
taaaaattataaagaaataa

SEQ ID NO: 6436 - RNA, 20 nt, synthetic construct
  source 1..20: mol_type = other RNA
tagcaattgatagtgatgag

SEQ ID NO: 6437 - RNA, 20 nt, synthetic construct
  source 1..20: mol_type = other RNA
attgctatgatttcgtgttt

SEQ ID NO: 6438 - RNA, 20 nt, synthetic construct
  source 1..20: mol_type = other RNA
ctatcaattgctatgatttc

SEQ ID NO: 6439 - RNA, 20 nt, synthetic construct
  source 1..20: mol_type = other RNA
ctcatcactatcaattgcta

SEQ ID NO: 6440 - RNA, 20 nt, synthetic construct
  source 1..20: mol_type = other RNA
ggaagaatgtagaagtaatt

SEQ ID NO: 6441 - RNA, 20 nt, synthetic construct
  source 1..20: mol_type = other RNA
cagtgaattacttctacatt

SEQ ID NO: 6442 - RNA, 20 nt, synthetic construct
  source 1..20: mol_type = other RNA
cattacctctctggttaaaa

SEQ ID NO: 6443 - RNA, 20 nt, synthetic construct
  source 1..20: mol_type = other RNA
aatttgtttgaaaaagaaca

SEQ ID NO: 6444 - RNA, 20 nt, synthetic construct
  source 1..20: mol_type = other RNA
atttcattcagcaacagacc

SEQ ID NO: 6445 - RNA, 20 nt, synthetic construct
  source 1..20: mol_type = other RNA
gcacttttccctctaatcta

SEQ ID NO: 6446 - RNA, 20 nt, synthetic construct
  source 1..20: mol_type = other RNA
agtaggcaaataaatgtttg

SEQ ID NO: 6447 - RNA, 20 nt, synthetic construct
  source 1..20: mol_type = other RNA
caggcaagtattcagtgacc

SEQ ID NO: 6448 - RNA, 20 nt, synthetic construct
  source 1..20: mol_type = other RNA
tctcaggcaagtattcagtg

SEQ ID NO: 6449 - RNA, 20 nt, synthetic construct
  source 1..20: mol_type = other RNA
ctggaagagacacaaatttc

SEQ ID NO: 6450 - RNA, 20 nt, synthetic construct
  source 1..20: mol_type = other RNA
attctcgtccttcagaacta

SEQ ID NO: 6451 - RNA, 20 nt, synthetic construct
  source 1..20: mol_type = other RNA
aaactttttgaaagcaatgc

SEQ ID NO: 6452 - RNA, 20 nt, synthetic construct
  source 1..20: mol_type = other RNA
attcttcagtatcaaccctt

SEQ ID NO: 6453 - RNA, 20 nt, synthetic construct
  source 1..20: mol_type = other RNA
accctttaaaaaaaagcaga

SEQ ID NO: 6454 - RNA, 20 nt, synthetic construct
  source 1..20: mol_type = other RNA
gcttttttttaaagggttga

SEQ ID NO: 6455 - RNA, 20 nt, synthetic construct
  source 1..20: mol_type = other RNA
tatgccaggataggcatagt

SEQ ID NO: 6456 - RNA, 20 nt, synthetic construct
  source 1..20: mol_type = other RNA
tggcataggattggtcactt

SEQ ID NO: 6457 - RNA, 20 nt, synthetic construct
  source 1..20: mol_type = other RNA
tatgccagacattaaaagaa

SEQ ID NO: 6458 - RNA, 20 nt, synthetic construct
  source 1..20: mol_type = other RNA
ctttcttttaatgtctggca

SEQ ID NO: 6459 - RNA, 20 nt, synthetic construct
  source 1..20: mol_type = other RNA
gaaaaagaaaaaataatgta

SEQ ID NO: 6460 - RNA, 20 nt, synthetic construct
  source 1..20: mol_type = other RNA
tcagcacctggtaaggtgcc

SEQ ID NO: 6461 - RNA, 20 nt, synthetic construct
  source 1..20: mol_type = other RNA
gtttttatcttcagcacctg

SEQ ID NO: 6462 - RNA, 20 nt, synthetic construct
  source 1..20: mol_type = other RNA
ttggttttatggtttttttg

SEQ ID NO: 6463 - RNA, 20 nt, synthetic construct
  source 1..20: mol_type = other RNA
tattcatcattggttttatg

SEQ ID NO: 6464 - RNA, 20 nt, synthetic construct
  source 1..20: mol_type = other RNA
ccttatctggatatgatttt

SEQ ID NO: 6465 - RNA, 20 nt, synthetic construct
  source 1..20: mol_type = other RNA
ggatatgattttgcccaatt

SEQ ID NO: 6466 - RNA, 20 nt, synthetic construct
  source 1..20: mol_type = other RNA
agataaggagattagagtag

SEQ ID NO: 6467 - RNA, 20 nt, synthetic construct
  source 1..20: mol_type = other RNA
tatccagataaggagattag

SEQ ID NO: 6468 - RNA, 20 nt, synthetic construct
  source 1..20: mol_type = other RNA
tcgaattgggcaaaatcata

SEQ ID NO: 6469 - RNA, 20 nt, synthetic construct
  source 1..20: mol_type = other RNA
gttgtgacagagggcactgg

SEQ ID NO: 6470 - RNA, 20 nt, synthetic construct
  source 1..20: mol_type = other RNA
aaacatatcacttctcacct

SEQ ID NO: 6471 - RNA, 20 nt, synthetic construct
  source 1..20: mol_type = other RNA
cttctcacctgagtttcttc

SEQ ID NO: 6472 - RNA, 20 nt, synthetic construct
  source 1..20: mol_type = other RNA
acggacaaagaagaaactca

SEQ ID NO: 6473 - RNA, 20 nt, synthetic construct
  source 1..20: mol_type = other RNA
ttgcatggcaaaggtgagct

SEQ ID NO: 6474 - RNA, 20 nt, synthetic construct
  source 1..20: mol_type = other RNA
atattatccttgcatggcaa

SEQ ID NO: 6475 - RNA, 20 nt, synthetic construct
  source 1..20: mol_type = other RNA
tctttcatgtttccctctct

SEQ ID NO: 6476 - RNA, 20 nt, synthetic construct
  source 1..20: mol_type = other RNA
ataaaacttctgtgaaaaat

SEQ ID NO: 6477 - RNA, 20 nt, synthetic construct
  source 1..20: mol_type = other RNA
taatttagttcgtaactgtg

SEQ ID NO: 6478 - RNA, 20 nt, synthetic construct
  source 1..20: mol_type = other RNA
tattcatatattgtgtgtgt

SEQ ID NO: 6479 - RNA, 20 nt, synthetic construct
  source 1..20: mol_type = other RNA
tgtgtgtatatcatattcat

SEQ ID NO: 6480 - RNA, 20 nt, synthetic construct
  source 1..20: mol_type = other RNA
tctcaaaacagttgttagac

SEQ ID NO: 6481 - RNA, 20 nt, synthetic construct
  source 1..20: mol_type = other RNA
tgcggtctaacaactgtttt

SEQ ID NO: 6482 - RNA, 20 nt, synthetic construct
  source 1..20: mol_type = other RNA
ttagtcttgtgatattttat

SEQ ID NO: 6483 - RNA, 20 nt, synthetic construct
  source 1..20: mol_type = other RNA
caagactaaagattaacttt

SEQ ID NO: 6484 - RNA, 20 nt, synthetic construct
  source 1..20: mol_type = other RNA
ccacaaagaccaatatccat

SEQ ID NO: 6485 - RNA, 20 nt, synthetic construct
  source 1..20: mol_type = other RNA
attgacatgagctcacagtt

SEQ ID NO: 6486 - RNA, 20 nt, synthetic construct
  source 1..20: mol_type = other RNA
agttagttacttacagcatt

SEQ ID NO: 6487 - RNA, 20 nt, synthetic construct
  source 1..20: mol_type = other RNA
ctactgtatacatctctatt

SEQ ID NO: 6488 - RNA, 20 nt, synthetic construct
  source 1..20: mol_type = other RNA
ctattcttcataaacttgag

SEQ ID NO: 6489 - RNA, 20 nt, synthetic construct
  source 1..20: mol_type = other RNA
ctcaccatctacaaaagaag

SEQ ID NO: 6490 - RNA, 20 nt, synthetic construct
  source 1..20: mol_type = other RNA
acaaaagaagattaataatt

SEQ ID NO: 6491 - RNA, 20 nt, synthetic construct
  source 1..20: mol_type = other RNA
tcttttgtagatggtgagag

SEQ ID NO: 6492 - RNA, 20 nt, synthetic construct
  source 1..20: mol_type = other RNA
ttagaaatgtccttcacata

SEQ ID NO: 6493 - RNA, 20 nt, synthetic construct
  source 1..20: mol_type = other RNA
tatatgtcaaaggaaggttt

SEQ ID NO: 6494 - RNA, 20 nt, synthetic construct
  source 1..20: mol_type = other RNA
aaattcagaactgtctactc

SEQ ID NO: 6495 - RNA, 20 nt, synthetic construct
  source 1..20: mol_type = other RNA
ttgtcctgtgacactggcac

SEQ ID NO: 6496 - RNA, 20 nt, synthetic construct
  source 1..20: mol_type = other RNA
aaaaaatgagaataaaacct

SEQ ID NO: 6497 - RNA, 20 nt, synthetic construct
  source 1..20: mol_type = other RNA
ggttttattctcattttttg

SEQ ID NO: 6498 - RNA, 20 nt, synthetic construct
  source 1..20: mol_type = other RNA
tttacaaattaaagatgtgc

SEQ ID NO: 6499 - RNA, 20 nt, synthetic construct
  source 1..20: mol_type = other RNA
acgtggacatcaaaatgtat

SEQ ID NO: 6500 - RNA, 20 nt, synthetic construct
  source 1..20: mol_type = other RNA
cctcggccccataggccgaa

SEQ ID NO: 6501 - RNA, 20 nt, synthetic construct
  source 1..20: mol_type = other RNA
tcaccagaaatttcacctca

SEQ ID NO: 6502 - RNA, 20 nt, synthetic construct
  source 1..20: mol_type = other RNA
cttaggtcagctccatcttc

SEQ ID NO: 6503 - RNA, 20 nt, synthetic construct
  source 1..20: mol_type = other RNA
gaaaactctgtctagtataa

SEQ ID NO: 6504 - RNA, 20 nt, synthetic construct
  source 1..20: mol_type = other RNA
aaacataaaactgtaccaca

SEQ ID NO: 6505 - RNA, 20 nt, synthetic construct
  source 1..20: mol_type = other RNA
taatgtaacaattaagaaat

SEQ ID NO: 6506 - RNA, 20 nt, synthetic construct
  source 1..20: mol_type = other RNA
gttctcccaactaattagaa

SEQ ID NO: 6507 - RNA, 20 nt, synthetic construct
  source 1..20: mol_type = other RNA
tctataatgtcaatcagttc

SEQ ID NO: 6508 - RNA, 20 nt, synthetic construct
  source 1..20: mol_type = other RNA
catatgccacttaagtaaaa

SEQ ID NO: 6509 - RNA, 20 nt, synthetic construct
  source 1..20: mol_type = other RNA
cacaataatatgaaggaaga

SEQ ID NO: 6510 - RNA, 20 nt, synthetic construct
  source 1..20: mol_type = other RNA
ttcccagccattaaaaaagc

SEQ ID NO: 6511 - RNA, 20 nt, synthetic construct
  source 1..20: mol_type = other RNA
tagagccacacactcaaagt

SEQ ID NO: 6512 - RNA, 20 nt, synthetic construct
  source 1..20: mol_type = other RNA
cacagcaaattacatggaag

SEQ ID NO: 6513 - RNA, 20 nt, synthetic construct
  source 1..20: mol_type = other RNA
ctctctgtaagtgtctcttc

SEQ ID NO: 6514 - RNA, 20 nt, synthetic construct
  source 1..20: mol_type = other RNA
tcagcttcctgccgtacaac

SEQ ID NO: 6515 - RNA, 20 nt, synthetic construct
  source 1..20: mol_type = other RNA
gaactccccagtattaccaa

SEQ ID NO: 6516 - RNA, 20 nt, synthetic construct
  source 1..20: mol_type = other RNA
gacaccctttggtagaaaag

SEQ ID NO: 6517 - RNA, 20 nt, synthetic construct
  source 1..20: mol_type = other RNA
tcggcgcacatcagtgtatg

SEQ ID NO: 6518 - RNA, 20 nt, synthetic construct
  source 1..20: mol_type = other RNA
gtgtatgggtttgctttata

SEQ ID NO: 6519 - RNA, 20 nt, synthetic construct
  source 1..20: mol_type = other RNA
gtaaataaaagtttttcttg

SEQ ID NO: 6520 - RNA, 20 nt, synthetic construct
  source 1..20: mol_type = other RNA
aaaacaaagggcccattatt

SEQ ID NO: 6521 - RNA, 20 nt, synthetic construct
  source 1..20: mol_type = other RNA
tgacttccatgctaagcagt

SEQ ID NO: 6522 - RNA, 20 nt, synthetic construct
  source 1..20: mol_type = other RNA
agctaggcccacaactgaag

SEQ ID NO: 6523 - RNA, 20 nt, synthetic construct
  source 1..20: mol_type = other RNA
ctcacttggaagtgatatag

SEQ ID NO: 6524 - RNA, 20 nt, synthetic construct
  source 1..20: mol_type = other RNA
cttccaagtgagagatccag

SEQ ID NO: 6525 - RNA, 20 nt, synthetic construct
  source 1..20: mol_type = other RNA
gaaaattttaatggataact

SEQ ID NO: 6526 - RNA, 20 nt, synthetic construct
  source 1..20: mol_type = other RNA
attaaaattttcagatttcc

SEQ ID NO: 6527 - RNA, 20 nt, synthetic construct
  source 1..20: mol_type = other RNA
gagagaaagtaatgaatact

SEQ ID NO: 6528 - RNA, 20 nt, synthetic construct
  source 1..20: mol_type = other RNA
atttgtaaatacttactttg

SEQ ID NO: 6529 - RNA, 20 nt, synthetic construct
  source 1..20: mol_type = other RNA
aagtaagtatttacaaatgg

SEQ ID NO: 6530 - RNA, 20 nt, synthetic construct
  source 1..20: mol_type = other RNA
taaacttttggtctatattc

SEQ ID NO: 6531 - RNA, 20 nt, synthetic construct
  source 1..20: mol_type = other RNA
ctgggttctagagggtgtgg

SEQ ID NO: 6532 - RNA, 20 nt, synthetic construct
  source 1..20: mol_type = other RNA
gacaaacattataaggttaa

SEQ ID NO: 6533 - RNA, 20 nt, synthetic construct
  source 1..20: mol_type = other RNA
acctcctcatccttagcatt

SEQ ID NO: 6534 - RNA, 20 nt, synthetic construct
  source 1..20: mol_type = other RNA
ttagcattgatctcaatgta

SEQ ID NO: 6535 - RNA, 20 nt, synthetic construct
  source 1..20: mol_type = other RNA
tacacagtgggcaggcacac

SEQ ID NO: 6536 - RNA, 20 nt, synthetic construct
  source 1..20: mol_type = other RNA
ccacgaaaaaaggttgccct

SEQ ID NO: 6537 - RNA, 20 nt, synthetic construct
  source 1..20: mol_type = other RNA
tccaccgccctgatccacac

SEQ ID NO: 6538 - RNA, 20 nt, synthetic construct
  source 1..20: mol_type = other RNA
gggcggtggaggatccccac

SEQ ID NO: 6539 - RNA, 20 nt, synthetic construct
  source 1..20: mol_type = other RNA
acacttcgcccattttcccc

SEQ ID NO: 6540 - RNA, 20 nt, synthetic construct
  source 1..20: mol_type = other RNA
tggcgagccattcctgaaac

SEQ ID NO: 6541 - RNA, 20 nt, synthetic construct
  source 1..20: mol_type = other RNA
agggaaactatgtagaagca

SEQ ID NO: 6542 - RNA, 20 nt, synthetic construct
  source 1..20: mol_type = other RNA
acgttaatatggtctttttg

SEQ ID NO: 6543 - RNA, 20 nt, synthetic construct
  source 1..20: mol_type = other RNA
tatttaatggagcgtccgct

SEQ ID NO: 6544 - RNA, 20 nt, synthetic construct
  source 1..20: mol_type = other RNA
cattaggtgaattaccaaga

SEQ ID NO: 6545 - RNA, 20 nt, synthetic construct
  source 1..20: mol_type = other RNA
ttacctagcgtcttggtaat

SEQ ID NO: 6546 - RNA, 20 nt, synthetic construct
  source 1..20: mol_type = other RNA
gaatgatctccatggagaaa

SEQ ID NO: 6547 - RNA, 20 nt, synthetic construct
  source 1..20: mol_type = other RNA
ttcagatttgctctttttcc

SEQ ID NO: 6548 - RNA, 20 nt, synthetic construct
  source 1..20: mol_type = other RNA
ccatggagaaaataaaacag

SEQ ID NO: 6549 - RNA, 20 nt, synthetic construct
  source 1..20: mol_type = other RNA
tgttttttaaaaagggcaaa

SEQ ID NO: 6550 - RNA, 20 nt, synthetic construct
  source 1..20: mol_type = other RNA
aggagtgacttcttgtcaga

SEQ ID NO: 6551 - RNA, 20 nt, synthetic construct
  source 1..20: mol_type = other RNA
gattaggaaataacagaaaa

SEQ ID NO: 6552 - RNA, 20 nt, synthetic construct
  source 1..20: mol_type = other RNA
gatatgagcgtgaagaagct

SEQ ID NO: 6553 - RNA, 20 nt, synthetic construct
  source 1..20: mol_type = other RNA
acaatggaatttaaaactct

SEQ ID NO: 6554 - RNA, 20 nt, synthetic construct
  source 1..20: mol_type = other RNA
ataagtatttagtgacttaa

SEQ ID NO: 6555 - RNA, 20 nt, synthetic construct
  source 1..20: mol_type = other RNA
gttgacagggagagagttct

SEQ ID NO: 6556 - RNA, 20 nt, synthetic construct
  source 1..20: mol_type = other RNA
cttcaaaaggatgatcattt

SEQ ID NO: 6557 - RNA, 20 nt, synthetic construct
  source 1..20: mol_type = other RNA
ttttgaagtgatttgtttag

SEQ ID NO: 6558 - RNA, 20 nt, synthetic construct
  source 1..20: mol_type = other RNA
tccttttgaagtgatttgtt

SEQ ID NO: 6559 - RNA, 20 nt, synthetic construct
  source 1..20: mol_type = other RNA
tttttcctgtgtcggtgata

SEQ ID NO: 6560 - RNA, 20 nt, synthetic construct
  source 1..20: mol_type = other RNA
ccgacacaggaaaaatgatc

SEQ ID NO: 6561 - RNA, 20 nt, synthetic construct
  source 1..20: mol_type = other RNA
tcactcacctgtgaggacag

SEQ ID NO: 6562 - RNA, 20 nt, synthetic construct
  source 1..20: mol_type = other RNA
gtaaagactgtcctcacagg

SEQ ID NO: 6563 - RNA, 20 nt, synthetic construct
  source 1..20: mol_type = other RNA
tctgatcagagtagatgccc

SEQ ID NO: 6564 - RNA, 20 nt, synthetic construct
  source 1..20: mol_type = other RNA
gaagatctgtaaagactgtc

SEQ ID NO: 6565 - RNA, 20 nt, synthetic construct
  source 1..20: mol_type = other RNA
gagtagatgccctgaaatgt

SEQ ID NO: 6566 - RNA, 20 nt, synthetic construct
  source 1..20: mol_type = other RNA
actctgatcagaagatctgt

SEQ ID NO: 6567 - RNA, 20 nt, synthetic construct
  source 1..20: mol_type = other RNA
cttaaaactgtaacttttca

SEQ ID NO: 6568 - RNA, 20 nt, synthetic construct
  source 1..20: mol_type = other RNA
gctgtggtgaatggaggcta

SEQ ID NO: 6569 - RNA, 20 nt, synthetic construct
  source 1..20: mol_type = other RNA
caggtgtgcaccaccacgcc

SEQ ID NO: 6570 - RNA, 20 nt, synthetic construct
  source 1..20: mol_type = other RNA
cagctactcgggaggctgag

SEQ ID NO: 6571 - RNA, 20 nt, synthetic construct
  source 1..20: mol_type = other RNA
cttgtacctggaaggtagag

SEQ ID NO: 6572 - RNA, 20 nt, synthetic construct
  source 1..20: mol_type = other RNA
atctgatcaatgagactagt

SEQ ID NO: 6573 - RNA, 20 nt, synthetic construct
  source 1..20: mol_type = other RNA
gatcaatgagactagtaaag

SEQ ID NO: 6574 - RNA, 20 nt, synthetic construct
  source 1..20: mol_type = other RNA
gatggatgaatacctcaagg

SEQ ID NO: 6575 - RNA, 20 nt, synthetic construct
  source 1..20: mol_type = other RNA
atgagactagtaaagaattc

SEQ ID NO: 6576 - RNA, 20 nt, synthetic construct
  source 1..20: mol_type = other RNA
tgctgttctctcacataaag

SEQ ID NO: 6577 - RNA, 20 nt, synthetic construct
  source 1..20: mol_type = other RNA
tgaaaatctatataacaaaa

SEQ ID NO: 6578 - RNA, 20 nt, synthetic construct
  source 1..20: mol_type = other RNA
atataacaaaaattaaatgt

SEQ ID NO: 6579 - RNA, 20 nt, synthetic construct
  source 1..20: mol_type = other RNA
ggttcactattaggatgtgg

SEQ ID NO: 6580 - RNA, 20 nt, synthetic construct
  source 1..20: mol_type = other RNA
taatagtgaacctgattttt

SEQ ID NO: 6581 - RNA, 20 nt, synthetic construct
  source 1..20: mol_type = other RNA
gcacagggtcaggggaatga

SEQ ID NO: 6582 - RNA, 20 nt, synthetic construct
  source 1..20: mol_type = other RNA
ttcccctgaccctgtgccga

SEQ ID NO: 6583 - RNA, 20 nt, synthetic construct
  source 1..20: mol_type = other RNA
ttaaaaatattcaaaataat

SEQ ID NO: 6584 - RNA, 20 nt, synthetic construct
  source 1..20: mol_type = other RNA
taattattttgaatattttt

SEQ ID NO: 6585 - RNA, 20 nt, synthetic construct
  source 1..20: mol_type = other RNA
ttaaatctcaagagttactg

SEQ ID NO: 6586 - RNA, 20 nt, synthetic construct
  source 1..20: mol_type = other RNA
caagagttactgggtgaaat

SEQ ID NO: 6587 - RNA, 20 nt, synthetic construct
  source 1..20: mol_type = other RNA
tctggattgtctgtgtcatc

SEQ ID NO: 6588 - RNA, 20 nt, synthetic construct
  source 1..20: mol_type = other RNA
ggattgtctgtgtcatcatc

SEQ ID NO: 6589 - RNA, 20 nt, synthetic construct
  source 1..20: mol_type = other RNA
agatgatagcgtgttttacc

SEQ ID NO: 6590 - RNA, 20 nt, synthetic construct
  source 1..20: mol_type = other RNA
tccactgaaagtaatgactg

SEQ ID NO: 6591 - RNA, 20 nt, synthetic construct
  source 1..20: mol_type = other RNA
actgaaagtaatgactgcac

SEQ ID NO: 6592 - RNA, 20 nt, synthetic construct
  source 1..20: mol_type = other RNA
agcttgaaatatttaaaatg

SEQ ID NO: 6593 - RNA, 20 nt, synthetic construct
  source 1..20: mol_type = other RNA
cattaggtcaagtccatctg

SEQ ID NO: 6594 - RNA, 20 nt, synthetic construct
  source 1..20: mol_type = other RNA
gtaatacaggcagcttatta

SEQ ID NO: 6595 - RNA, 20 nt, synthetic construct
  source 1..20: mol_type = other RNA
cacatttttataaagttgct

SEQ ID NO: 6596 - RNA, 20 nt, synthetic construct
  source 1..20: mol_type = other RNA
atcgtaccaaaaaggataga

SEQ ID NO: 6597 - RNA, 20 nt, synthetic construct
  source 1..20: mol_type = other RNA
taccaaaaaggatagaaaaa

SEQ ID NO: 6598 - RNA, 20 nt, synthetic construct
  source 1..20: mol_type = other RNA
tttttggtacgatagataat

SEQ ID NO: 6599 - RNA, 20 nt, synthetic construct
  source 1..20: mol_type = other RNA
cctcagggagcccaggttgc

SEQ ID NO: 6600 - RNA, 20 nt, synthetic construct
  source 1..20: mol_type = other RNA
actgggggaaggtactggaa

SEQ ID NO: 6601 - RNA, 20 nt, synthetic construct
  source 1..20: mol_type = other RNA
agcatgttatgaaagctatg

SEQ ID NO: 6602 - RNA, 20 nt, synthetic construct
  source 1..20: mol_type = other RNA
gcagaggtacttcatgaaca

SEQ ID NO: 6603 - RNA, 20 nt, synthetic construct
  source 1..20: mol_type = other RNA
gcatctgcagaggtacttca

SEQ ID NO: 6604 - RNA, 20 nt, synthetic construct
  source 1..20: mol_type = other RNA
agtaattatataaataaaca

SEQ ID NO: 6605 - RNA, 20 nt, synthetic construct
  source 1..20: mol_type = other RNA
ttcaacaaatattgattaaa

SEQ ID NO: 6606 - RNA, 20 nt, synthetic construct
  source 1..20: mol_type = other RNA
atatttgttgaatgataatc

SEQ ID NO: 6607 - RNA, 20 nt, synthetic construct
  source 1..20: mol_type = other RNA
gccaggcactgtgcatggga

SEQ ID NO: 6608 - RNA, 20 nt, synthetic construct
  source 1..20: mol_type = other RNA
ttcatggtaatcacttcgta

SEQ ID NO: 6609 - RNA, 20 nt, synthetic construct
  source 1..20: mol_type = other RNA
tgaccaatctggatggcaaa

SEQ ID NO: 6610 - RNA, 20 nt, synthetic construct
  source 1..20: mol_type = other RNA
ggatggcaaaaaaaggctca

SEQ ID NO: 6611 - RNA, 20 nt, synthetic construct
  source 1..20: mol_type = other RNA
agattggtcaggatccttca

SEQ ID NO: 6612 - RNA, 20 nt, synthetic construct
  source 1..20: mol_type = other RNA
actatgctttttctggatca

SEQ ID NO: 6613 - RNA, 20 nt, synthetic construct
  source 1..20: mol_type = other RNA
ttttccacttgaagaagtgc

SEQ ID NO: 6614 - RNA, 20 nt, synthetic construct
  source 1..20: mol_type = other RNA
gacatatacttacagcagga

SEQ ID NO: 6615 - RNA, 20 nt, synthetic construct
  source 1..20: mol_type = other RNA
tgctgtaagtatatgtctga

SEQ ID NO: 6616 - RNA, 20 nt, synthetic construct
  source 1..20: mol_type = other RNA
atgctttggactacaaataa

SEQ ID NO: 6617 - RNA, 20 nt, synthetic construct
  source 1..20: mol_type = other RNA
aacacagatattgcctccat

SEQ ID NO: 6618 - RNA, 20 nt, synthetic construct
  source 1..20: mol_type = other RNA
gtgttagataaatatttata

SEQ ID NO: 6619 - RNA, 20 nt, synthetic construct
  source 1..20: mol_type = other RNA
aaatggtttataatgcttta

SEQ ID NO: 6620 - RNA, 20 nt, synthetic construct
  source 1..20: mol_type = other RNA
atcaaaaccatttccaactt

SEQ ID NO: 6621 - RNA, 20 nt, synthetic construct
  source 1..20: mol_type = other RNA
aaaccatttccaacttatga

SEQ ID NO: 6622 - RNA, 20 nt, synthetic construct
  source 1..20: mol_type = other RNA
ttttaattaaagagggagag

SEQ ID NO: 6623 - RNA, 20 nt, synthetic construct
  source 1..20: mol_type = other RNA
ctgaaacatataattttaag

SEQ ID NO: 6624 - RNA, 20 nt, synthetic construct
  source 1..20: mol_type = other RNA
ttctaaaaaaattaagttca

SEQ ID NO: 6625 - RNA, 20 nt, synthetic construct
  source 1..20: mol_type = other RNA
acgtctagaaaacctacatc

SEQ ID NO: 6626 - RNA, 20 nt, synthetic construct
  source 1..20: mol_type = other RNA
aactccttggtaagagcagg

SEQ ID NO: 6627 - RNA, 20 nt, synthetic construct
  source 1..20: mol_type = other RNA
ccagcctgaccctgctctta

SEQ ID NO: 6628 - RNA, 20 nt, synthetic construct
  source 1..20: mol_type = other RNA
tcaaattattataaaagaac

SEQ ID NO: 6629 - RNA, 20 nt, synthetic construct
  source 1..20: mol_type = other RNA
gccaacatcacaaggacttc

SEQ ID NO: 6630 - RNA, 20 nt, synthetic construct
  source 1..20: mol_type = other RNA
caaggacttcataggctgcc

SEQ ID NO: 6631 - RNA, 20 nt, synthetic construct
  source 1..20: mol_type = other RNA
gctattcgctgtactacacc

SEQ ID NO: 6632 - RNA, 20 nt, synthetic construct
  source 1..20: mol_type = other RNA
acttaaattactcattaaac

SEQ ID NO: 6633 - RNA, 20 nt, synthetic construct
  source 1..20: mol_type = other RNA
acagttgaaatgaaagtaga

SEQ ID NO: 6634 - RNA, 20 nt, synthetic construct
  source 1..20: mol_type = other RNA
ctgtcatcctaagaagatct

SEQ ID NO: 6635 - RNA, 20 nt, synthetic construct
  source 1..20: mol_type = other RNA
taagaagatcttaggatggc

SEQ ID NO: 6636 - RNA, 20 nt, synthetic construct
  source 1..20: mol_type = other RNA
tcttaggatgacagcgataa

SEQ ID NO: 6637 - RNA, 20 nt, synthetic construct
  source 1..20: mol_type = other RNA
taggatggcagcaaaagaaa

SEQ ID NO: 6638 - RNA, 20 nt, synthetic construct
  source 1..20: mol_type = other RNA
taagatcttcttaggatgac

SEQ ID NO: 6639 - RNA, 20 nt, synthetic construct
  source 1..20: mol_type = other RNA
attctgggttttacagcttt

SEQ ID NO: 6640 - RNA, 20 nt, synthetic construct
  source 1..20: mol_type = other RNA
ctcagtaatgcaaggttagc

SEQ ID NO: 6641 - RNA, 20 nt, synthetic construct
  source 1..20: mol_type = other RNA
ctggttaggaaggatacaca

SEQ ID NO: 6642 - RNA, 20 nt, synthetic construct
  source 1..20: mol_type = other RNA
ttcctaaccagtgatccctc

SEQ ID NO: 6643 - RNA, 20 nt, synthetic construct
  source 1..20: mol_type = other RNA
tcttttctgtgtatccttcc

SEQ ID NO: 6644 - RNA, 20 nt, synthetic construct
  source 1..20: mol_type = other RNA
gaacttcagggttgcaaagg

SEQ ID NO: 6645 - RNA, 20 nt, synthetic construct
  source 1..20: mol_type = other RNA
ctttcttccttgaaggtttt

SEQ ID NO: 6646 - RNA, 20 nt, synthetic construct
  source 1..20: mol_type = other RNA
acaccattcagtacaatggg

SEQ ID NO: 6647 - RNA, 20 nt, synthetic construct
  source 1..20: mol_type = other RNA
ctccccattgtactgaatgg

SEQ ID NO: 6648 - RNA, 20 nt, synthetic construct
  source 1..20: mol_type = other RNA
aggcactgtatatgattttt

SEQ ID NO: 6649 - RNA, 20 nt, synthetic construct
  source 1..20: mol_type = other RNA
tatacagtgccttgattaaa

SEQ ID NO: 6650 - RNA, 20 nt, synthetic construct
  source 1..20: mol_type = other RNA
gttttaggtaagaaaaaaaa

SEQ ID NO: 6651 - RNA, 20 nt, synthetic construct
  source 1..20: mol_type = other RNA
catataaatatttctctact

SEQ ID NO: 6652 - RNA, 20 nt, synthetic construct
  source 1..20: mol_type = other RNA
tatcacatataaatatttct

SEQ ID NO: 6653 - RNA, 20 nt, synthetic construct
  source 1..20: mol_type = other RNA
taagaggtatcttatcacat

SEQ ID NO: 6654 - RNA, 20 nt, synthetic construct
  source 1..20: mol_type = other RNA
tgaagaaactatttgctgtt

SEQ ID NO: 6655 - RNA, 20 nt, synthetic construct
  source 1..20: mol_type = other RNA
aactaactttgttcctttct

SEQ ID NO: 6656 - RNA, 20 nt, synthetic construct
  source 1..20: mol_type = other RNA
ctttgtaatgttgaccctcc

SEQ ID NO: 6657 - RNA, 20 nt, synthetic construct
  source 1..20: mol_type = other RNA
ttcaaatttgtacccataaa

SEQ ID NO: 6658 - RNA, 20 nt, synthetic construct
  source 1..20: mol_type = other RNA
aattttgtattagttttatg

SEQ ID NO: 6659 - RNA, 20 nt, synthetic construct
  source 1..20: mol_type = other RNA
actaaatgaagaaatgcaca

SEQ ID NO: 6660 - RNA, 20 nt, synthetic construct
  source 1..20: mol_type = other RNA
tatattatccactaaatgaa

SEQ ID NO: 6661 - RNA, 20 nt, synthetic construct
  source 1..20: mol_type = other RNA
gtgagtctgtgtatcctata

SEQ ID NO: 6662 - RNA, 20 nt, synthetic construct
  source 1..20: mol_type = other RNA
tttgggactgaagtttcaaa

SEQ ID NO: 6663 - RNA, 20 nt, synthetic construct
  source 1..20: mol_type = other RNA
aaagtatggaaaatgcacgt

SEQ ID NO: 6664 - RNA, 20 nt, synthetic construct
  source 1..20: mol_type = other RNA
gtcaacaggactttcatcca

SEQ ID NO: 6665 - RNA, 20 nt, synthetic construct
  source 1..20: mol_type = other RNA
aacaatggtttaatgagtga

SEQ ID NO: 6666 - RNA, 20 nt, synthetic construct
  source 1..20: mol_type = other RNA
ctcattaaaccattgttaga

SEQ ID NO: 6667 - RNA, 20 nt, synthetic construct
  source 1..20: mol_type = other RNA
tcaacatgaatattatgctc

SEQ ID NO: 6668 - RNA, 20 nt, synthetic construct
  source 1..20: mol_type = other RNA
ttgaattaaaatatgtgttc

SEQ ID NO: 6669 - RNA, 20 nt, synthetic construct
  source 1..20: mol_type = other RNA
tatcttgcactttcttatca

SEQ ID NO: 6670 - RNA, 20 nt, synthetic construct
  source 1..20: mol_type = other RNA
tgcactttcttatcagagca

SEQ ID NO: 6671 - RNA, 20 nt, synthetic construct
  source 1..20: mol_type = other RNA
ttttaaactaaaaaggcaag

SEQ ID NO: 6672 - RNA, 20 nt, synthetic construct
  source 1..20: mol_type = other RNA
ctcttttctatgtatcccca

SEQ ID NO: 6673 - RNA, 20 nt, synthetic construct
  source 1..20: mol_type = other RNA
ccagtagccaagaatatttt

SEQ ID NO: 6674 - RNA, 20 nt, synthetic construct
  source 1..20: mol_type = other RNA
catatgtaccccaccactgg

SEQ ID NO: 6675 - RNA, 20 nt, synthetic construct
  source 1..20: mol_type = other RNA
gaagaggcagcccctaacca

SEQ ID NO: 6676 - RNA, 20 nt, synthetic construct
  source 1..20: mol_type = other RNA
cccttaaaagaagacagaca

SEQ ID NO: 6677 - RNA, 20 nt, synthetic construct
  source 1..20: mol_type = other RNA
atcttattttcccacttaca

SEQ ID NO: 6678 - RNA, 20 nt, synthetic construct
  source 1..20: mol_type = other RNA
tattttcccacttacacaca

SEQ ID NO: 6679 - RNA, 20 nt, synthetic construct
  source 1..20: mol_type = other RNA
gccatgtgataagatggagc

SEQ ID NO: 6680 - RNA, 20 nt, synthetic construct
  source 1..20: mol_type = other RNA
catggcagattcttcagtgc

SEQ ID NO: 6681 - RNA, 20 nt, synthetic construct
  source 1..20: mol_type = other RNA
tatcacatggcagattcttc

SEQ ID NO: 6682 - RNA, 20 nt, synthetic construct
  source 1..20: mol_type = other RNA
agacccttctttcactctgt

SEQ ID NO: 6683 - RNA, 20 nt, synthetic construct
  source 1..20: mol_type = other RNA
tactggcagggcacttacgc

SEQ ID NO: 6684 - RNA, 20 nt, synthetic construct
  source 1..20: mol_type = other RNA
tacagctgaatgtgagacca

SEQ ID NO: 6685 - RNA, 20 nt, synthetic construct
  source 1..20: mol_type = other RNA
agccaagtaatctcatcttc

SEQ ID NO: 6686 - RNA, 20 nt, synthetic construct
  source 1..20: mol_type = other RNA
catcttcaagcatcgtagct

SEQ ID NO: 6687 - RNA, 20 nt, synthetic construct
  source 1..20: mol_type = other RNA
tcaagcatcgtagctgggct

SEQ ID NO: 6688 - RNA, 20 nt, synthetic construct
  source 1..20: mol_type = other RNA
tagctgggctgatccttaac

SEQ ID NO: 6689 - RNA, 20 nt, synthetic construct
  source 1..20: mol_type = other RNA
gcccagctacgatgcttgaa

SEQ ID NO: 6690 - RNA, 20 nt, synthetic construct
  source 1..20: mol_type = other RNA
ttaactgctccatttctgaa

SEQ ID NO: 6691 - RNA, 20 nt, synthetic construct
  source 1..20: mol_type = other RNA
attacaaagaaagaaggatt

SEQ ID NO: 6692 - RNA, 20 nt, synthetic construct
  source 1..20: mol_type = other RNA
ttaaggccaggcgagctggc

SEQ ID NO: 6693 - RNA, 20 nt, synthetic construct
  source 1..20: mol_type = other RNA
gtaatcccagcactttggga

SEQ ID NO: 6694 - RNA, 20 nt, synthetic construct
  source 1..20: mol_type = other RNA
cagcactttgggaggctgag

SEQ ID NO: 6695 - RNA, 20 nt, synthetic construct
  source 1..20: mol_type = other RNA
gcccacctcagcctcccaaa

SEQ ID NO: 6696 - RNA, 20 nt, synthetic construct
  source 1..20: mol_type = other RNA
tgaggtcaggagttcgagac

SEQ ID NO: 6697 - RNA, 20 nt, synthetic construct
  source 1..20: mol_type = other RNA
cagctcactgcaacctctgc

SEQ ID NO: 6698 - RNA, 20 nt, synthetic construct
  source 1..20: mol_type = other RNA
cgccactgtactccagactg

SEQ ID NO: 6699 - RNA, 20 nt, synthetic construct
  source 1..20: mol_type = other RNA
tggcactttgggaggcgaag

SEQ ID NO: 6700 - RNA, 20 nt, synthetic construct
  source 1..20: mol_type = other RNA
caggcgtaagccactgcgcc

SEQ ID NO: 6701 - RNA, 20 nt, synthetic construct
  source 1..20: mol_type = other RNA
gtttcgtaagtgtctgtcaa

SEQ ID NO: 6702 - RNA, 20 nt, synthetic construct
  source 1..20: mol_type = other RNA
gccaccatagaaatgttgtt

SEQ ID NO: 6703 - RNA, 20 nt, synthetic construct
  source 1..20: mol_type = other RNA
ctttcccagcacctaagtct

SEQ ID NO: 6704 - RNA, 20 nt, synthetic construct
  source 1..20: mol_type = other RNA
acaaaaatagcaattggtaa

SEQ ID NO: 6705 - RNA, 20 nt, synthetic construct
  source 1..20: mol_type = other RNA
tgatttttattttattaatt

SEQ ID NO: 6706 - RNA, 20 nt, synthetic construct
  source 1..20: mol_type = other RNA
ggatccacaaaaatagcaat

SEQ ID NO: 6707 - RNA, 20 nt, synthetic construct
  source 1..20: mol_type = other RNA
tgagtttgttattctccgct

SEQ ID NO: 6708 - RNA, 20 nt, synthetic construct
  source 1..20: mol_type = other RNA
gaactaaaatttacacagag

SEQ ID NO: 6709 - RNA, 20 nt, synthetic construct
  source 1..20: mol_type = other RNA
gtgtaattaaaatatgagcc

SEQ ID NO: 6710 - RNA, 20 nt, synthetic construct
  source 1..20: mol_type = other RNA
acaaatgttctcaattcatt

SEQ ID NO: 6711 - RNA, 20 nt, synthetic construct
  source 1..20: mol_type = other RNA
gacaagtaagtaaatgacta

SEQ ID NO: 6712 - RNA, 20 nt, synthetic construct
  source 1..20: mol_type = other RNA
tctaataactggcatctcaa

SEQ ID NO: 6713 - RNA, 20 nt, synthetic construct
  source 1..20: mol_type = other RNA
aataactggcatctcaaatc

SEQ ID NO: 6714 - RNA, 20 nt, synthetic construct
  source 1..20: mol_type = other RNA
caaatcaaaatactccatac

SEQ ID NO: 6715 - RNA, 20 nt, synthetic construct
  source 1..20: mol_type = other RNA
aaatactccatacactgaga

SEQ ID NO: 6716 - RNA, 20 nt, synthetic construct
  source 1..20: mol_type = other RNA
cagtgtatggagtattttga

SEQ ID NO: 6717 - RNA, 20 nt, synthetic construct
  source 1..20: mol_type = other RNA
gcctcttattagtaactgaa

SEQ ID NO: 6718 - RNA, 20 nt, synthetic construct
  source 1..20: mol_type = other RNA
tgctcacttgttttatgaat

SEQ ID NO: 6719 - RNA, 20 nt, synthetic construct
  source 1..20: mol_type = other RNA
gtatgcttcttgctaaaata

SEQ ID NO: 6720 - RNA, 20 nt, synthetic construct
  source 1..20: mol_type = other RNA
gtattagtaaaatcagtatg

SEQ ID NO: 6721 - RNA, 20 nt, synthetic construct
  source 1..20: mol_type = other RNA
atcacatcttaaaataatat

SEQ ID NO: 6722 - RNA, 20 nt, synthetic construct
  source 1..20: mol_type = other RNA
catcttaaaataatatatgc

SEQ ID NO: 6723 - RNA, 20 nt, synthetic construct
  source 1..20: mol_type = other RNA
taaaataatatatgcactga

SEQ ID NO: 6724 - RNA, 20 nt, synthetic construct
  source 1..20: mol_type = other RNA
tcagactggcctaatgagtt

SEQ ID NO: 6725 - RNA, 20 nt, synthetic construct
  source 1..20: mol_type = other RNA
gctgtatatttatggtaata

SEQ ID NO: 6726 - RNA, 20 nt, synthetic construct
  source 1..20: mol_type = other RNA
tgatggtaaactataacata

SEQ ID NO: 6727 - RNA, 20 nt, synthetic construct
  source 1..20: mol_type = other RNA
agatttaagctgaattagac

SEQ ID NO: 6728 - RNA, 20 nt, synthetic construct
  source 1..20: mol_type = other RNA
ggaatgttaaaacagaaggt

SEQ ID NO: 6729 - RNA, 20 nt, synthetic construct
  source 1..20: mol_type = other RNA
cggcttctacataaatatta

SEQ ID NO: 6730 - RNA, 20 nt, synthetic construct
  source 1..20: mol_type = other RNA
ctgtatattagaaagtgcat

SEQ ID NO: 6731 - RNA, 20 nt, synthetic construct
  source 1..20: mol_type = other RNA
aaaacagaggtattaaaaaa

SEQ ID NO: 6732 - RNA, 20 nt, synthetic construct
  source 1..20: mol_type = other RNA
attcttgactttttttaata

SEQ ID NO: 6733 - RNA, 20 nt, synthetic construct
  source 1..20: mol_type = other RNA
aagaaaccagagggaaaatt

SEQ ID NO: 6734 - RNA, 20 nt, synthetic construct
  source 1..20: mol_type = other RNA
cataacacttcttttgatat

SEQ ID NO: 6735 - RNA, 20 nt, synthetic construct
  source 1..20: mol_type = other RNA
tttcaaaaaaccagctcctc

SEQ ID NO: 6736 - RNA, 20 nt, synthetic construct
  source 1..20: mol_type = other RNA
aggagctggttttttgaaaa

SEQ ID NO: 6737 - RNA, 20 nt, synthetic construct
  source 1..20: mol_type = other RNA
gtgaatcgaggagctggttt

SEQ ID NO: 6738 - RNA, 20 nt, synthetic construct
  source 1..20: mol_type = other RNA
tcttcagttctgctctgatc

SEQ ID NO: 6739 - RNA, 20 nt, synthetic construct
  source 1..20: mol_type = other RNA
gagcagaactgaagaagata

SEQ ID NO: 6740 - RNA, 20 nt, synthetic construct
  source 1..20: mol_type = other RNA
tagttattttttgccttctg

SEQ ID NO: 6741 - RNA, 20 nt, synthetic construct
  source 1..20: mol_type = other RNA
caattaaaagaactagagaa

SEQ ID NO: 6742 - RNA, 20 nt, synthetic construct
  source 1..20: mol_type = other RNA
acaattgacaccctaacatc

SEQ ID NO: 6743 - RNA, 20 nt, synthetic construct
  source 1..20: mol_type = other RNA
ttcctgctttctcctgtggg

SEQ ID NO: 6744 - RNA, 20 nt, synthetic construct
  source 1..20: mol_type = other RNA
ctgggacacagctaaagcaa

SEQ ID NO: 6745 - RNA, 20 nt, synthetic construct
  source 1..20: mol_type = other RNA
cacaactacatggaaactga

SEQ ID NO: 6746 - RNA, 20 nt, synthetic construct
  source 1..20: mol_type = other RNA
acagaatatacattcttttc

SEQ ID NO: 6747 - RNA, 20 nt, synthetic construct
  source 1..20: mol_type = other RNA
acagaactctccaccccaaa

SEQ ID NO: 6748 - RNA, 20 nt, synthetic construct
  source 1..20: mol_type = other RNA
ctgaatagaccaataacaag

SEQ ID NO: 6749 - RNA, 20 nt, synthetic construct
  source 1..20: mol_type = other RNA
ggtcctgggccttttttggt

SEQ ID NO: 6750 - RNA, 20 nt, synthetic construct
  source 1..20: mol_type = other RNA
atctggtcctgggccttttt

SEQ ID NO: 6751 - RNA, 20 nt, synthetic construct
  source 1..20: mol_type = other RNA
ctcttatttaacatagtatt

SEQ ID NO: 6752 - RNA, 20 nt, synthetic construct
  source 1..20: mol_type = other RNA
ggcaagagaaagaaataaag

SEQ ID NO: 6753 - RNA, 20 nt, synthetic construct
  source 1..20: mol_type = other RNA
gaataccctttatttctttc

SEQ ID NO: 6754 - RNA, 20 nt, synthetic construct
  source 1..20: mol_type = other RNA
gcaaacagagacagtttgac

SEQ ID NO: 6755 - RNA, 20 nt, synthetic construct
  source 1..20: mol_type = other RNA
tgtcatctgcaaacagagac

SEQ ID NO: 6756 - RNA, 20 nt, synthetic construct
  source 1..20: mol_type = other RNA
tctctcaggccaaaatctcc

SEQ ID NO: 6757 - RNA, 20 nt, synthetic construct
  source 1..20: mol_type = other RNA
ccttaagcaacttcagcaaa

SEQ ID NO: 6758 - RNA, 20 nt, synthetic construct
  source 1..20: mol_type = other RNA
tgagactttgctgaagttgc

SEQ ID NO: 6759 - RNA, 20 nt, synthetic construct
  source 1..20: mol_type = other RNA
atgtgcaaaatcacaaacat

SEQ ID NO: 6760 - RNA, 20 nt, synthetic construct
  source 1..20: mol_type = other RNA
caaacattcctatacacgaa

SEQ ID NO: 6761 - RNA, 20 nt, synthetic construct
  source 1..20: mol_type = other RNA
tgagtgaactcccattcaca

SEQ ID NO: 6762 - RNA, 20 nt, synthetic construct
  source 1..20: mol_type = other RNA
atgttgtgaaaatggccacg

SEQ ID NO: 6763 - RNA, 20 nt, synthetic construct
  source 1..20: mol_type = other RNA
ataaattactttgggcagcg

SEQ ID NO: 6764 - RNA, 20 nt, synthetic construct
  source 1..20: mol_type = other RNA
ccatcaagctaccactgact

SEQ ID NO: 6765 - RNA, 20 nt, synthetic construct
  source 1..20: mol_type = other RNA
agctaccactgactttcttc

SEQ ID NO: 6766 - RNA, 20 nt, synthetic construct
  source 1..20: mol_type = other RNA
taagcaaaaagaacaaagct

SEQ ID NO: 6767 - RNA, 20 nt, synthetic construct
  source 1..20: mol_type = other RNA
tgctacctgacttcaaacta

SEQ ID NO: 6768 - RNA, 20 nt, synthetic construct
  source 1..20: mol_type = other RNA
ttttcttgtttttaatgtaa

SEQ ID NO: 6769 - RNA, 20 nt, synthetic construct
  source 1..20: mol_type = other RNA
ttgttatttctttcctttta

SEQ ID NO: 6770 - RNA, 20 nt, synthetic construct
  source 1..20: mol_type = other RNA
atgaaaccaaaagttgcctc

SEQ ID NO: 6771 - RNA, 20 nt, synthetic construct
  source 1..20: mol_type = other RNA
ttctcccttttttgtgttag

SEQ ID NO: 6772 - RNA, 20 nt, synthetic construct
  source 1..20: mol_type = other RNA
aattactaaactcagaaatg

SEQ ID NO: 6773 - RNA, 20 nt, synthetic construct
  source 1..20: mol_type = other RNA
aaaaaaaaaaaaagaaaaga

SEQ ID NO: 6774 - RNA, 20 nt, synthetic construct
  source 1..20: mol_type = other RNA
ggtccagggcttttctttgt

SEQ ID NO: 6775 - RNA, 20 nt, synthetic construct
  source 1..20: mol_type = other RNA
aaattgaaaagggagtaaaa

SEQ ID NO: 6776 - RNA, 20 nt, synthetic construct
  source 1..20: mol_type = other RNA
gttaacagatgacatgttac

SEQ ID NO: 6777 - RNA, 20 nt, synthetic construct
  source 1..20: mol_type = other RNA
gttaacagataattttactc

SEQ ID NO: 6778 - RNA, 20 nt, synthetic construct
  source 1..20: mol_type = other RNA
cggctcactgcaagctccgc

SEQ ID NO: 6779 - RNA, 20 nt, synthetic construct
  source 1..20: mol_type = other RNA
acaattccacttacaatagc

SEQ ID NO: 6780 - RNA, 20 nt, synthetic construct
  source 1..20: mol_type = other RNA
aaaataataaaatacttagg

SEQ ID NO: 6781 - RNA, 20 nt, synthetic construct
  source 1..20: mol_type = other RNA
acaaacattgctgaaagaaa

SEQ ID NO: 6782 - RNA, 20 nt, synthetic construct
  source 1..20: mol_type = other RNA
ttaatttctttcagcaatgt

SEQ ID NO: 6783 - RNA, 20 nt, synthetic construct
  source 1..20: mol_type = other RNA
tgtgttcaaggattgaaaga

SEQ ID NO: 6784 - RNA, 20 nt, synthetic construct
  source 1..20: mol_type = other RNA
ttgaacacaagatgtctttt

SEQ ID NO: 6785 - RNA, 20 nt, synthetic construct
  source 1..20: mol_type = other RNA
tgtgtcacaaagttttccct

SEQ ID NO: 6786 - RNA, 20 nt, synthetic construct
  source 1..20: mol_type = other RNA
gcaacatacatgacagacaa

SEQ ID NO: 6787 - RNA, 20 nt, synthetic construct
  source 1..20: mol_type = other RNA
ccaaactgggaaaataaaat

SEQ ID NO: 6788 - RNA, 20 nt, synthetic construct
  source 1..20: mol_type = other RNA
gaggtaggtaataaaaatgg

SEQ ID NO: 6789 - RNA, 20 nt, synthetic construct
  source 1..20: mol_type = other RNA
tcacggctcagctgcctctc

SEQ ID NO: 6790 - RNA, 20 nt, synthetic construct
  source 1..20: mol_type = other RNA
gtttcttctaggcgtaatcc

SEQ ID NO: 6791 - RNA, 20 nt, synthetic construct
  source 1..20: mol_type = other RNA
ggatgcgctgatgtgtctgt

SEQ ID NO: 6792 - RNA, 20 nt, synthetic construct
  source 1..20: mol_type = other RNA
agatgtgcagaagccaaatc

SEQ ID NO: 6793 - RNA, 20 nt, synthetic construct
  source 1..20: mol_type = other RNA
gcgcatccagatgtgcagaa

SEQ ID NO: 6794 - RNA, 20 nt, synthetic construct
  source 1..20: mol_type = other RNA
gctgtacactcttagtcaga

SEQ ID NO: 6795 - RNA, 20 nt, synthetic construct
  source 1..20: mol_type = other RNA
caggcaacccggcgaatctg

SEQ ID NO: 6796 - RNA, 20 nt, synthetic construct
  source 1..20: mol_type = other RNA
gaaattacatgatcagcagc

SEQ ID NO: 6797 - RNA, 20 nt, synthetic construct
  source 1..20: mol_type = other RNA
tgtaatttcagattcgccgg

SEQ ID NO: 6798 - RNA, 20 nt, synthetic construct
  source 1..20: mol_type = other RNA
gcagcaaaggacagacatga

SEQ ID NO: 6799 - RNA, 20 nt, synthetic construct
  source 1..20: mol_type = other RNA
acatgttgagactgcttaaa

SEQ ID NO: 6800 - RNA, 20 nt, synthetic construct
  source 1..20: mol_type = other RNA
ttacctcagcacttggtgat

SEQ ID NO: 6801 - RNA, 20 nt, synthetic construct
  source 1..20: mol_type = other RNA
ccaagtgctgaggtaaggat

SEQ ID NO: 6802 - RNA, 20 nt, synthetic construct
  source 1..20: mol_type = other RNA
gagcagaatatcaatgatga

SEQ ID NO: 6803 - RNA, 20 nt, synthetic construct
  source 1..20: mol_type = other RNA
atgatgaaatcagcaacaca

SEQ ID NO: 6804 - RNA, 20 nt, synthetic construct
  source 1..20: mol_type = other RNA
ttgatattctgctcggatca

SEQ ID NO: 6805 - RNA, 20 nt, synthetic construct
  source 1..20: mol_type = other RNA
gcaacacagggcaagttata

SEQ ID NO: 6806 - RNA, 20 nt, synthetic construct
  source 1..20: mol_type = other RNA
ttctataacttgccctgtgt

SEQ ID NO: 6807 - RNA, 20 nt, synthetic construct
  source 1..20: mol_type = other RNA
cccatttcttcttattagca

SEQ ID NO: 6808 - RNA, 20 nt, synthetic construct
  source 1..20: mol_type = other RNA
aaatttgaaaatgcattacc

SEQ ID NO: 6809 - RNA, 20 nt, synthetic construct
  source 1..20: mol_type = other RNA
aggcaagacatttattctgt

SEQ ID NO: 6810 - RNA, 20 nt, synthetic construct
  source 1..20: mol_type = other RNA
atagttgcaaactataaaat

SEQ ID NO: 6811 - RNA, 20 nt, synthetic construct
  source 1..20: mol_type = other RNA
tttgtaagtttattttaagg

SEQ ID NO: 6812 - RNA, 20 nt, synthetic construct
  source 1..20: mol_type = other RNA
gttatcatttgtaagtttat

SEQ ID NO: 6813 - RNA, 20 nt, synthetic construct
  source 1..20: mol_type = other RNA
ttacaagggggtggacactg

SEQ ID NO: 6814 - RNA, 20 nt, synthetic construct
  source 1..20: mol_type = other RNA
tcttgcttctgccttgcagt

SEQ ID NO: 6815 - RNA, 20 nt, synthetic construct
  source 1..20: mol_type = other RNA
aggaagaaatgtaaagaatt

SEQ ID NO: 6816 - RNA, 20 nt, synthetic construct
  source 1..20: mol_type = other RNA
ctttcagggaaaggccaagt

SEQ ID NO: 6817 - RNA, 20 nt, synthetic construct
  source 1..20: mol_type = other RNA
caaacaagcctccagcatac

SEQ ID NO: 6818 - RNA, 20 nt, synthetic construct
  source 1..20: mol_type = other RNA
gcgagtctttggtggataca

SEQ ID NO: 6819 - RNA, 20 nt, synthetic construct
  source 1..20: mol_type = other RNA
accaaagactcgctgattgc

SEQ ID NO: 6820 - RNA, 20 nt, synthetic construct
  source 1..20: mol_type = other RNA
gtgttcgacaacagtctgta

SEQ ID NO: 6821 - RNA, 20 nt, synthetic construct
  source 1..20: mol_type = other RNA
acagtaaatttctgcttacc

SEQ ID NO: 6822 - RNA, 20 nt, synthetic construct
  source 1..20: mol_type = other RNA
tacaggaactatgcaatatt

SEQ ID NO: 6823 - RNA, 20 nt, synthetic construct
  source 1..20: mol_type = other RNA
aaatgtgttcacaaggcaaa

SEQ ID NO: 6824 - RNA, 20 nt, synthetic construct
  source 1..20: mol_type = other RNA
cctgaaattagttttgcctt

SEQ ID NO: 6825 - RNA, 20 nt, synthetic construct
  source 1..20: mol_type = other RNA
ctattttagaaatacctcaa

SEQ ID NO: 6826 - RNA, 20 nt, synthetic construct
  source 1..20: mol_type = other RNA
ttgtggcaataatacaaatt

SEQ ID NO: 6827 - RNA, 20 nt, synthetic construct
  source 1..20: mol_type = other RNA
acagtttttagcttagctga

SEQ ID NO: 6828 - RNA, 20 nt, synthetic construct
  source 1..20: mol_type = other RNA
agctctgtatacacttagta

SEQ ID NO: 6829 - RNA, 20 nt, synthetic construct
  source 1..20: mol_type = other RNA
gtacctgaactgctgagtct

SEQ ID NO: 6830 - RNA, 20 nt, synthetic construct
  source 1..20: mol_type = other RNA
tgttgggagtagccagccaa

SEQ ID NO: 6831 - RNA, 20 nt, synthetic construct
  source 1..20: mol_type = other RNA
agccgtcctgcagccgcagc

SEQ ID NO: 6832 - RNA, 20 nt, synthetic construct
  source 1..20: mol_type = other RNA
catgaagcaagccacagtag

SEQ ID NO: 6833 - RNA, 20 nt, synthetic construct
  source 1..20: mol_type = other RNA
cttacttccattgtctaaag

SEQ ID NO: 6834 - RNA, 20 nt, synthetic construct
  source 1..20: mol_type = other RNA
cttacttgtattgcaactcg

SEQ ID NO: 6835 - RNA, 20 nt, synthetic construct
  source 1..20: mol_type = other RNA
ctgctgctcgagttgcaata

SEQ ID NO: 6836 - RNA, 20 nt, synthetic construct
  source 1..20: mol_type = other RNA
tccctgctgctcgagttgca

SEQ ID NO: 6837 - RNA, 20 nt, synthetic construct
  source 1..20: mol_type = other RNA
gacacggacaactgtcggta

SEQ ID NO: 6838 - RNA, 20 nt, synthetic construct
  source 1..20: mol_type = other RNA
taccgacagttgtccgtgtc

SEQ ID NO: 6839 - RNA, 20 nt, synthetic construct
  source 1..20: mol_type = other RNA
gtctgcttgtctgccggctg

SEQ ID NO: 6840 - RNA, 20 nt, synthetic construct
  source 1..20: mol_type = other RNA
ttggtgaggtcttcatctaa

SEQ ID NO: 6841 - RNA, 20 nt, synthetic construct
  source 1..20: mol_type = other RNA
aataacgtgggcattgtttg

SEQ ID NO: 6842 - RNA, 20 nt, synthetic construct
  source 1..20: mol_type = other RNA
taaaaagaaacagctagact

SEQ ID NO: 6843 - RNA, 20 nt, synthetic construct
  source 1..20: mol_type = other RNA
gtctacagcttgcaaggtat

SEQ ID NO: 6844 - RNA, 20 nt, synthetic construct
  source 1..20: mol_type = other RNA
gaagtagactatgaaacaag

SEQ ID NO: 6845 - RNA, 20 nt, synthetic construct
  source 1..20: mol_type = other RNA
catcagaagtagactatgaa

SEQ ID NO: 6846 - RNA, 20 nt, synthetic construct
  source 1..20: mol_type = other RNA
tgcctttttttcttcttttt

SEQ ID NO: 6847 - RNA, 20 nt, synthetic construct
  source 1..20: mol_type = other RNA
gtcatcatcaattacttagt

SEQ ID NO: 6848 - RNA, 20 nt, synthetic construct
  source 1..20: mol_type = other RNA
tcaattacttagtttctaca

SEQ ID NO: 6849 - RNA, 20 nt, synthetic construct
  source 1..20: mol_type = other RNA
attacttagtttctacatga

SEQ ID NO: 6850 - RNA, 20 nt, synthetic construct
  source 1..20: mol_type = other RNA
ttcaatggtttcctatttcc

SEQ ID NO: 6851 - RNA, 20 nt, synthetic construct
  source 1..20: mol_type = other RNA
ccttcaggtctttgctagat

SEQ ID NO: 6852 - RNA, 20 nt, synthetic construct
  source 1..20: mol_type = other RNA
agcaaagacctgaaggagat

SEQ ID NO: 6853 - RNA, 20 nt, synthetic construct
  source 1..20: mol_type = other RNA
ggaaaagcttcgctggggtg

SEQ ID NO: 6854 - RNA, 20 nt, synthetic construct
  source 1..20: mol_type = other RNA
ccctactgaaaatcatagcc

SEQ ID NO: 6855 - RNA, 20 nt, synthetic construct
  source 1..20: mol_type = other RNA
ctcagccatttacagggctg

SEQ ID NO: 6856 - RNA, 20 nt, synthetic construct
  source 1..20: mol_type = other RNA
tctgctcatgctttgagctg

SEQ ID NO: 6857 - RNA, 20 nt, synthetic construct
  source 1..20: mol_type = other RNA
tttgcttgaacaccaggcaa

SEQ ID NO: 6858 - RNA, 20 nt, synthetic construct
  source 1..20: mol_type = other RNA
cctgtcttgggaacctcagt

SEQ ID NO: 6859 - RNA, 20 nt, synthetic construct
  source 1..20: mol_type = other RNA
gctgcctctcaaaggcagag

SEQ ID NO: 6860 - RNA, 20 nt, synthetic construct
  source 1..20: mol_type = other RNA
ctgcctttgagaggcagctg

SEQ ID NO: 6861 - RNA, 20 nt, synthetic construct
  source 1..20: mol_type = other RNA
aatttatctttgcatcccca

SEQ ID NO: 6862 - RNA, 20 nt, synthetic construct
  source 1..20: mol_type = other RNA
gtttcttttgtgtctcatgt

SEQ ID NO: 6863 - RNA, 20 nt, synthetic construct
  source 1..20: mol_type = other RNA
ttctgtgaaaacttcctcaa

SEQ ID NO: 6864 - RNA, 20 nt, synthetic construct
  source 1..20: mol_type = other RNA
tcagctgttggcatgagttt

SEQ ID NO: 6865 - RNA, 20 nt, synthetic construct
  source 1..20: mol_type = other RNA
gctgttggcatgagtttgga

SEQ ID NO: 6866 - RNA, 20 nt, synthetic construct
  source 1..20: mol_type = other RNA
gttccctaggttctaagctc

SEQ ID NO: 6867 - RNA, 20 nt, synthetic construct
  source 1..20: mol_type = other RNA
acacattttcagcagaaatt

SEQ ID NO: 6868 - RNA, 20 nt, synthetic construct
  source 1..20: mol_type = other RNA
tgaaacatcagcttctacat

SEQ ID NO: 6869 - RNA, 20 nt, synthetic construct
  source 1..20: mol_type = other RNA
cattttccctattctattta

SEQ ID NO: 6870 - RNA, 20 nt, synthetic construct
  source 1..20: mol_type = other RNA
ttccgttctagagaaagctg

SEQ ID NO: 6871 - RNA, 20 nt, synthetic construct
  source 1..20: mol_type = other RNA
agcatatcacatgaaattat

SEQ ID NO: 6872 - RNA, 20 nt, synthetic construct
  source 1..20: mol_type = other RNA
ttctaaagaatatatctagc

SEQ ID NO: 6873 - RNA, 20 nt, synthetic construct
  source 1..20: mol_type = other RNA
tgcatttttaatatatgggc

SEQ ID NO: 6874 - RNA, 20 nt, synthetic construct
  source 1..20: mol_type = other RNA
taacttaataagcagttgtt

SEQ ID NO: 6875 - RNA, 20 nt, synthetic construct
  source 1..20: mol_type = other RNA
aaggaattcacacctactca

SEQ ID NO: 6876 - RNA, 20 nt, synthetic construct
  source 1..20: mol_type = other RNA
caagatgcaaattctttagg

SEQ ID NO: 6877 - RNA, 20 nt, synthetic construct
  source 1..20: mol_type = other RNA
tgtgattcctgccagatctg

SEQ ID NO: 6878 - RNA, 20 nt, synthetic construct
  source 1..20: mol_type = other RNA
gtttattaaacagggtgaac

SEQ ID NO: 6879 - RNA, 20 nt, synthetic construct
  source 1..20: mol_type = other RNA
ttcctgtgaaaagacatgtt

SEQ ID NO: 6880 - RNA, 20 nt, synthetic construct
  source 1..20: mol_type = other RNA
caccttgaagcagtaagata

SEQ ID NO: 6881 - RNA, 20 nt, synthetic construct
  source 1..20: mol_type = other RNA
tactgcttcaaggtgtgatg

SEQ ID NO: 6882 - RNA, 20 nt, synthetic construct
  source 1..20: mol_type = other RNA
aggcactaaagaatagaatc

SEQ ID NO: 6883 - RNA, 20 nt, synthetic construct
  source 1..20: mol_type = other RNA
ttcagggctttattttcttc

SEQ ID NO: 6884 - RNA, 20 nt, synthetic construct
  source 1..20: mol_type = other RNA
tttgccccgggaatgtctac

SEQ ID NO: 6885 - RNA, 20 nt, synthetic construct
  source 1..20: mol_type = other RNA
aaacagactttctaaaattg

SEQ ID NO: 6886 - RNA, 20 nt, synthetic construct
  source 1..20: mol_type = other RNA
aagcaacagcaccagccaag

SEQ ID NO: 6887 - RNA, 20 nt, synthetic construct
  source 1..20: mol_type = other RNA
ctgtcatcaaagcaacagca

SEQ ID NO: 6888 - RNA, 20 nt, synthetic construct
  source 1..20: mol_type = other RNA
ccatccctgtcatcaaagca

SEQ ID NO: 6889 - RNA, 20 nt, synthetic construct
  source 1..20: mol_type = other RNA
agttctcagtcctcaaaatc

SEQ ID NO: 6890 - RNA, 20 nt, synthetic construct
  source 1..20: mol_type = other RNA
ctaaatactgataataaaat

SEQ ID NO: 6891 - RNA, 20 nt, synthetic construct
  source 1..20: mol_type = other RNA
gtatttagagatacaaattt

SEQ ID NO: 6892 - RNA, 20 nt, synthetic construct
  source 1..20: mol_type = other RNA
tataattttattatcagtat

SEQ ID NO: 6893 - RNA, 20 nt, synthetic construct
  source 1..20: mol_type = other RNA
gttaagctaatactagtgat

SEQ ID NO: 6894 - RNA, 20 nt, synthetic construct
  source 1..20: mol_type = other RNA
atttattctgagaacataat

SEQ ID NO: 6895 - RNA, 20 nt, synthetic construct
  source 1..20: mol_type = other RNA
ataatattgtttaattatgt

SEQ ID NO: 6896 - RNA, 20 nt, synthetic construct
  source 1..20: mol_type = other RNA
cttaaggaacaacattctaa

SEQ ID NO: 6897 - RNA, 20 nt, synthetic construct
  source 1..20: mol_type = other RNA
actgtgaaaaaattaaatga

SEQ ID NO: 6898 - RNA, 20 nt, synthetic construct
  source 1..20: mol_type = other RNA
tttaattttttcacagttga

SEQ ID NO: 6899 - RNA, 20 nt, synthetic construct
  source 1..20: mol_type = other RNA
atttatattagcaactcaga

SEQ ID NO: 6900 - RNA, 20 nt, synthetic construct
  source 1..20: mol_type = other RNA
ttgcgtatgtctgagttgct

SEQ ID NO: 6901 - RNA, 20 nt, synthetic construct
  source 1..20: mol_type = other RNA
gattcaaagaggcatcatgg

SEQ ID NO: 6902 - RNA, 20 nt, synthetic construct
  source 1..20: mol_type = other RNA
gatcattgcgtatgtctgag

SEQ ID NO: 6903 - RNA, 20 nt, synthetic construct
  source 1..20: mol_type = other RNA
tgggtaatgaaaaacgtctc

SEQ ID NO: 6904 - RNA, 20 nt, synthetic construct
  source 1..20: mol_type = other RNA
caactagagtctgatctggg

SEQ ID NO: 6905 - RNA, 20 nt, synthetic construct
  source 1..20: mol_type = other RNA
gactctagttgtgattcagt

SEQ ID NO: 6906 - RNA, 20 nt, synthetic construct
  source 1..20: mol_type = other RNA
gggacaagtaacttcatccc

SEQ ID NO: 6907 - RNA, 20 nt, synthetic construct
  source 1..20: mol_type = other RNA
tcctacctcagcctcctgag

SEQ ID NO: 6908 - RNA, 20 nt, synthetic construct
  source 1..20: mol_type = other RNA
caccagctaatttttttatt

SEQ ID NO: 6909 - RNA, 20 nt, synthetic construct
  source 1..20: mol_type = other RNA
caattcagtgagtgaaaata

SEQ ID NO: 6910 - RNA, 20 nt, synthetic construct
  source 1..20: mol_type = other RNA
agttgatcaagggcttcctg

SEQ ID NO: 6911 - RNA, 20 nt, synthetic construct
  source 1..20: mol_type = other RNA
acttgattctttaggaagaa

SEQ ID NO: 6912 - RNA, 20 nt, synthetic construct
  source 1..20: mol_type = other RNA
agggcttcctgaatggctgg

SEQ ID NO: 6913 - RNA, 20 nt, synthetic construct
  source 1..20: mol_type = other RNA
agccattcaggaagcccttg

SEQ ID NO: 6914 - RNA, 20 nt, synthetic construct
  source 1..20: mol_type = other RNA
gtgggtatcaagagcagaag

SEQ ID NO: 6915 - RNA, 20 nt, synthetic construct
  source 1..20: mol_type = other RNA
agagcagaagcttccgtact

SEQ ID NO: 6916 - RNA, 20 nt, synthetic construct
  source 1..20: mol_type = other RNA
tgaagtttttcaaatacaaa

SEQ ID NO: 6917 - RNA, 20 nt, synthetic construct
  source 1..20: mol_type = other RNA
ggaagagccaaggtaaatat

SEQ ID NO: 6918 - RNA, 20 nt, synthetic construct
  source 1..20: mol_type = other RNA
gctcgccaatctggaagagc

SEQ ID NO: 6919 - RNA, 20 nt, synthetic construct
  source 1..20: mol_type = other RNA
ctacaccagggagggatttc

SEQ ID NO: 6920 - RNA, 20 nt, synthetic construct
  source 1..20: mol_type = other RNA
ctccctggtgtagtgatggc

SEQ ID NO: 6921 - RNA, 20 nt, synthetic construct
  source 1..20: mol_type = other RNA
ggagaaatccctccctggtg

SEQ ID NO: 6922 - RNA, 20 nt, synthetic construct
  source 1..20: mol_type = other RNA
ctccccctgttctctactgg

SEQ ID NO: 6923 - RNA, 20 nt, synthetic construct
  source 1..20: mol_type = other RNA
cttttatgcagttataacca

SEQ ID NO: 6924 - RNA, 20 nt, synthetic construct
  source 1..20: mol_type = other RNA
gaatctcttttatgcagtta

SEQ ID NO: 6925 - RNA, 20 nt, synthetic construct
  source 1..20: mol_type = other RNA
gacatcattacacaacgtat

SEQ ID NO: 6926 - RNA, 20 nt, synthetic construct
  source 1..20: mol_type = other RNA
ttacacaacgtatttacaag

SEQ ID NO: 6927 - RNA, 20 nt, synthetic construct
  source 1..20: mol_type = other RNA
tcccacttgtaaatacgttg

SEQ ID NO: 6928 - RNA, 20 nt, synthetic construct
  source 1..20: mol_type = other RNA
tgaatttattaaaaatcttc

SEQ ID NO: 6929 - RNA, 20 nt, synthetic construct
  source 1..20: mol_type = other RNA
tcaagtttaataatttttaa

SEQ ID NO: 6930 - RNA, 20 nt, synthetic construct
  source 1..20: mol_type = other RNA
ttctgagtggggtttctttt

SEQ ID NO: 6931 - RNA, 20 nt, synthetic construct
  source 1..20: mol_type = other RNA
aagaactcttcaagtttagt

SEQ ID NO: 6932 - RNA, 20 nt, synthetic construct
  source 1..20: mol_type = other RNA
ctctagtaaggtttatgctc

SEQ ID NO: 6933 - RNA, 20 nt, synthetic construct
  source 1..20: mol_type = other RNA
ttttaatttacagagcataa

SEQ ID NO: 6934 - RNA, 20 nt, synthetic construct
  source 1..20: mol_type = other RNA
atatttcaatgacttcatga

SEQ ID NO: 6935 - RNA, 20 nt, synthetic construct
  source 1..20: mol_type = other RNA
tgttctaggcactgttttag

SEQ ID NO: 6936 - RNA, 20 nt, synthetic construct
  source 1..20: mol_type = other RNA
cgaattgagctccttatacc

SEQ ID NO: 6937 - RNA, 20 nt, synthetic construct
  source 1..20: mol_type = other RNA
taatttatcccgaattgagc

SEQ ID NO: 6938 - RNA, 20 nt, synthetic construct
  source 1..20: mol_type = other RNA
cttaagtgtctactaggcac

SEQ ID NO: 6939 - RNA, 20 nt, synthetic construct
  source 1..20: mol_type = other RNA
acttaacatctcttaagtgt

SEQ ID NO: 6940 - RNA, 20 nt, synthetic construct
  source 1..20: mol_type = other RNA
atccacttaacatctcttaa

SEQ ID NO: 6941 - RNA, 20 nt, synthetic construct
  source 1..20: mol_type = other RNA
atttatttcaggttaaaact

SEQ ID NO: 6942 - RNA, 20 nt, synthetic construct
  source 1..20: mol_type = other RNA
gcaaagctccttgaaacagt

SEQ ID NO: 6943 - RNA, 20 nt, synthetic construct
  source 1..20: mol_type = other RNA
cacttacaccttcagttact

SEQ ID NO: 6944 - RNA, 20 nt, synthetic construct
  source 1..20: mol_type = other RNA
atttccatttaaaaacaaga

SEQ ID NO: 6945 - RNA, 20 nt, synthetic construct
  source 1..20: mol_type = other RNA
cccagtacctgctccatggc

SEQ ID NO: 6946 - RNA, 20 nt, synthetic construct
  source 1..20: mol_type = other RNA
gctgaactcccagatggggt

SEQ ID NO: 6947 - RNA, 20 nt, synthetic construct
  source 1..20: mol_type = other RNA
gggagttcagcagattcttc

SEQ ID NO: 6948 - RNA, 20 nt, synthetic construct
  source 1..20: mol_type = other RNA
ttacagtgaagacttctggc

SEQ ID NO: 6949 - RNA, 20 nt, synthetic construct
  source 1..20: mol_type = other RNA
gaaaagcccagttggtggag

SEQ ID NO: 6950 - RNA, 20 nt, synthetic construct
  source 1..20: mol_type = other RNA
aaagctactccaccaactgg

SEQ ID NO: 6951 - RNA, 20 nt, synthetic construct
  source 1..20: mol_type = other RNA
ttattcactgtcagctgcaa

SEQ ID NO: 6952 - RNA, 20 nt, synthetic construct
  source 1..20: mol_type = other RNA
tttattattcatcaaaactg

SEQ ID NO: 6953 - RNA, 20 nt, synthetic construct
  source 1..20: mol_type = other RNA
aaactgcttatttaaaccta

SEQ ID NO: 6954 - RNA, 20 nt, synthetic construct
  source 1..20: mol_type = other RNA
tttgtaaatatctgtatatt

SEQ ID NO: 6955 - RNA, 20 nt, synthetic construct
  source 1..20: mol_type = other RNA
gtatattatccacaggagag

SEQ ID NO: 6956 - RNA, 20 nt, synthetic construct
  source 1..20: mol_type = other RNA
acaggagagcacaactgctt

SEQ ID NO: 6957 - RNA, 20 nt, synthetic construct
  source 1..20: mol_type = other RNA
gcttgtaccccacagtttca

SEQ ID NO: 6958 - RNA, 20 nt, synthetic construct
  source 1..20: mol_type = other RNA
ttggtagactcataggtaac

SEQ ID NO: 6959 - RNA, 20 nt, synthetic construct
  source 1..20: mol_type = other RNA
tttaacccttaatgttacct

SEQ ID NO: 6960 - RNA, 20 nt, synthetic construct
  source 1..20: mol_type = other RNA
ttaaaaaacgaataagtcaa

SEQ ID NO: 6961 - RNA, 20 nt, synthetic construct
  source 1..20: mol_type = other RNA
gacttgacttattcgttttt

SEQ ID NO: 6962 - RNA, 20 nt, synthetic construct
  source 1..20: mol_type = other RNA
cttgagtccagcctaagcaa

SEQ ID NO: 6963 - RNA, 20 nt, synthetic construct
  source 1..20: mol_type = other RNA
taaaaaaaggaagtggctta

SEQ ID NO: 6964 - RNA, 20 nt, synthetic construct
  source 1..20: mol_type = other RNA
ctatagaggtaagccacttc

SEQ ID NO: 6965 - RNA, 20 nt, synthetic construct
  source 1..20: mol_type = other RNA
catagcgctctgccagaagc

SEQ ID NO: 6966 - RNA, 20 nt, synthetic construct
  source 1..20: mol_type = other RNA
ctcaattattacaagtttag

SEQ ID NO: 6967 - RNA, 20 nt, synthetic construct
  source 1..20: mol_type = other RNA
actaaacttgtaataattga

SEQ ID NO: 6968 - RNA, 20 nt, synthetic construct
  source 1..20: mol_type = other RNA
atagattaaaaaaaaaaagt

SEQ ID NO: 6969 - RNA, 20 nt, synthetic construct
  source 1..20: mol_type = other RNA
atagatctactaaacttgta

SEQ ID NO: 6970 - RNA, 20 nt, synthetic construct
  source 1..20: mol_type = other RNA
cacttcaaatacattttaat

SEQ ID NO: 6971 - RNA, 20 nt, synthetic construct
  source 1..20: mol_type = other RNA
tcacacttcaaatacatttt

SEQ ID NO: 6972 - RNA, 20 nt, synthetic construct
  source 1..20: mol_type = other RNA
gagctcagttctagtctgtt

SEQ ID NO: 6973 - RNA, 20 nt, synthetic construct
  source 1..20: mol_type = other RNA
tataactaaaatatgatata

SEQ ID NO: 6974 - RNA, 20 nt, synthetic construct
  source 1..20: mol_type = other RNA
tattttagttataagataaa

SEQ ID NO: 6975 - RNA, 20 nt, synthetic construct
  source 1..20: mol_type = other RNA
gacaaagttctgaactgcct

SEQ ID NO: 6976 - RNA, 20 nt, synthetic construct
  source 1..20: mol_type = other RNA
gtaagtacgacacaaacaaa

SEQ ID NO: 6977 - RNA, 20 nt, synthetic construct
  source 1..20: mol_type = other RNA
ataattgttccaacttgggg

SEQ ID NO: 6978 - RNA, 20 nt, synthetic construct
  source 1..20: mol_type = other RNA
catttcactagtttggaaag

SEQ ID NO: 6979 - RNA, 20 nt, synthetic construct
  source 1..20: mol_type = other RNA
tttcatatttggtggactac

SEQ ID NO: 6980 - RNA, 20 nt, synthetic construct
  source 1..20: mol_type = other RNA
tgagttgaatctatcattac

SEQ ID NO: 6981 - RNA, 20 nt, synthetic construct
  source 1..20: mol_type = other RNA
atcattacttctgccattta

SEQ ID NO: 6982 - RNA, 20 nt, synthetic construct
  source 1..20: mol_type = other RNA
ttacttctgccatttaaaaa

SEQ ID NO: 6983 - RNA, 20 nt, synthetic construct
  source 1..20: mol_type = other RNA
aagcaatgagtcctttcttc

SEQ ID NO: 6984 - RNA, 20 nt, synthetic construct
  source 1..20: mol_type = other RNA
cgttgtgaataagaatagcc

SEQ ID NO: 6985 - RNA, 20 nt, synthetic construct
  source 1..20: mol_type = other RNA
ctagagggcagcagcagagt

SEQ ID NO: 6986 - RNA, 20 nt, synthetic construct
  source 1..20: mol_type = other RNA
cattgctgttttttgagttt

SEQ ID NO: 6987 - RNA, 20 nt, synthetic construct
  source 1..20: mol_type = other RNA
ccaaatgtttgtgtgaaaac

SEQ ID NO: 6988 - RNA, 20 nt, synthetic construct
  source 1..20: mol_type = other RNA
tagtcactaaaatattattc

SEQ ID NO: 6989 - RNA, 20 nt, synthetic construct
  source 1..20: mol_type = other RNA
tatgcaagcataatgcatac

SEQ ID NO: 6990 - RNA, 20 nt, synthetic construct
  source 1..20: mol_type = other RNA
tcttctacttcattctgctt

SEQ ID NO: 6991 - RNA, 20 nt, synthetic construct
  source 1..20: mol_type = other RNA
tctacttcattctgcttacc

SEQ ID NO: 6992 - RNA, 20 nt, synthetic construct
  source 1..20: mol_type = other RNA
aataaaaactaaaacaagaa

SEQ ID NO: 6993 - RNA, 20 nt, synthetic construct
  source 1..20: mol_type = other RNA
ccaggaccacccgagtactt

SEQ ID NO: 6994 - RNA, 20 nt, synthetic construct
  source 1..20: mol_type = other RNA
gtgcctctttggaagttctg

SEQ ID NO: 6995 - RNA, 20 nt, synthetic construct
  source 1..20: mol_type = other RNA
gaagtgaaaaatacacaaca

SEQ ID NO: 6996 - RNA, 20 nt, synthetic construct
  source 1..20: mol_type = other RNA
cttacctataaggagactga

SEQ ID NO: 6997 - RNA, 20 nt, synthetic construct
  source 1..20: mol_type = other RNA
gggtttctcaacctggactc

SEQ ID NO: 6998 - RNA, 20 nt, synthetic construct
  source 1..20: mol_type = other RNA
aaatatgtcattataaaaaa

SEQ ID NO: 6999 - RNA, 20 nt, synthetic construct
  source 1..20: mol_type = other RNA
aagcaaaaatgttccaaaag

SEQ ID NO: 7000 - RNA, 20 nt, synthetic construct
  source 1..20: mol_type = other RNA
actgaatatgaatgtttaag

SEQ ID NO: 7001 - RNA, 20 nt, synthetic construct
  source 1..20: mol_type = other RNA
cttttatttccagcatgacg

SEQ ID NO: 7002 - RNA, 20 nt, synthetic construct
  source 1..20: mol_type = other RNA
agccacaaacatcaacatta

SEQ ID NO: 7003 - RNA, 20 nt, synthetic construct
  source 1..20: mol_type = other RNA
acattataaattatctaaaa

SEQ ID NO: 7004 - RNA, 20 nt, synthetic construct
  source 1..20: mol_type = other RNA
aaaaatataaaattatgaaa

SEQ ID NO: 7005 - RNA, 20 nt, synthetic construct
  source 1..20: mol_type = other RNA
ctttgaggtaaatgcttttt

SEQ ID NO: 7006 - RNA, 20 nt, synthetic construct
  source 1..20: mol_type = other RNA
tgtgtagcaatcagcaatga

SEQ ID NO: 7007 - RNA, 20 nt, synthetic construct
  source 1..20: mol_type = other RNA
gcaatgaatttcttatgtaa

SEQ ID NO: 7008 - RNA, 20 nt, synthetic construct
  source 1..20: mol_type = other RNA
ttacataagaaattcattgc

SEQ ID NO: 7009 - RNA, 20 nt, synthetic construct
  source 1..20: mol_type = other RNA
tgaaagagtatatggaaatt

SEQ ID NO: 7010 - RNA, 20 nt, synthetic construct
  source 1..20: mol_type = other RNA
ttattcaggacaaaatatca

SEQ ID NO: 7011 - RNA, 20 nt, synthetic construct
  source 1..20: mol_type = other RNA
aaataaagaagccaattttt

SEQ ID NO: 7012 - RNA, 20 nt, synthetic construct
  source 1..20: mol_type = other RNA
atatacaaaaaagcagaaaa

SEQ ID NO: 7013 - RNA, 20 nt, synthetic construct
  source 1..20: mol_type = other RNA
aaggaaagaagttatccata

SEQ ID NO: 7014 - RNA, 20 nt, synthetic construct
  source 1..20: mol_type = other RNA
aggatttagattaatgtaac

SEQ ID NO: 7015 - RNA, 20 nt, synthetic construct
  source 1..20: mol_type = other RNA
tagattaaagaaggtaggta

SEQ ID NO: 7016 - RNA, 20 nt, synthetic construct
  source 1..20: mol_type = other RNA
aaatcctagattaaagaagg

SEQ ID NO: 7017 - RNA, 20 nt, synthetic construct
  source 1..20: mol_type = other RNA
taaactatagttacattaat

SEQ ID NO: 7018 - RNA, 20 nt, synthetic construct
  source 1..20: mol_type = other RNA
ggtgattccatggctatttt

SEQ ID NO: 7019 - RNA, 20 nt, synthetic construct
  source 1..20: mol_type = other RNA
cctgatgaagaaattgctaa

SEQ ID NO: 7020 - RNA, 20 nt, synthetic construct
  source 1..20: mol_type = other RNA
attcctatcaattccagctt

SEQ ID NO: 7021 - RNA, 20 nt, synthetic construct
  source 1..20: mol_type = other RNA
attccagcttttctacatac

SEQ ID NO: 7022 - RNA, 20 nt, synthetic construct
  source 1..20: mol_type = other RNA
agatcacaaagttacaaaat

SEQ ID NO: 7023 - RNA, 20 nt, synthetic construct
  source 1..20: mol_type = other RNA
tgatatgctttataatttaa

SEQ ID NO: 7024 - RNA, 20 nt, synthetic construct
  source 1..20: mol_type = other RNA
caaagttacaaaatcacaga

SEQ ID NO: 7025 - RNA, 20 nt, synthetic construct
  source 1..20: mol_type = other RNA
tgagtccacacctcttcagt

SEQ ID NO: 7026 - RNA, 20 nt, synthetic construct
  source 1..20: mol_type = other RNA
gtataatattattttcatat

SEQ ID NO: 7027 - RNA, 20 nt, synthetic construct
  source 1..20: mol_type = other RNA
agtataacttgatattcagc

SEQ ID NO: 7028 - RNA, 20 nt, synthetic construct
  source 1..20: mol_type = other RNA
aaactatctagatttgagaa

SEQ ID NO: 7029 - RNA, 20 nt, synthetic construct
  source 1..20: mol_type = other RNA
agatttgagaataacgtact

SEQ ID NO: 7030 - RNA, 20 nt, synthetic construct
  source 1..20: mol_type = other RNA
agatagtttggataatctag

SEQ ID NO: 7031 - RNA, 20 nt, synthetic construct
  source 1..20: mol_type = other RNA
atgatcacaaagattcacat

SEQ ID NO: 7032 - RNA, 20 nt, synthetic construct
  source 1..20: mol_type = other RNA
attgaaaagacaaggagctc

SEQ ID NO: 7033 - RNA, 20 nt, synthetic construct
  source 1..20: mol_type = other RNA
tcgattgaaaagacaaggag

SEQ ID NO: 7034 - RNA, 20 nt, synthetic construct
  source 1..20: mol_type = other RNA
caaagattcacattttcaaa

SEQ ID NO: 7035 - RNA, 20 nt, synthetic construct
  source 1..20: mol_type = other RNA
ttgtgatcatcgattgaaaa

SEQ ID NO: 7036 - RNA, 20 nt, synthetic construct
  source 1..20: mol_type = other RNA
tcaacaatacttgttattat

SEQ ID NO: 7037 - RNA, 20 nt, synthetic construct
  source 1..20: mol_type = other RNA
caccagcaatatatgagggt

SEQ ID NO: 7038 - RNA, 20 nt, synthetic construct
  source 1..20: mol_type = other RNA
gacttctagatatacatcca

SEQ ID NO: 7039 - RNA, 20 nt, synthetic construct
  source 1..20: mol_type = other RNA
agaagtcagattgttctgac

SEQ ID NO: 7040 - RNA, 20 nt, synthetic construct
  source 1..20: mol_type = other RNA
aagagaaatgcaaactcgta

SEQ ID NO: 7041 - RNA, 20 nt, synthetic construct
  source 1..20: mol_type = other RNA
aattgccaaattgtcttttt

SEQ ID NO: 7042 - RNA, 20 nt, synthetic construct
  source 1..20: mol_type = other RNA
agcaggccatatgatttaaa

SEQ ID NO: 7043 - RNA, 20 nt, synthetic construct
  source 1..20: mol_type = other RNA
tatggcctgctagatcaaat

SEQ ID NO: 7044 - RNA, 20 nt, synthetic construct
  source 1..20: mol_type = other RNA
tataattagtttttaaatca

SEQ ID NO: 7045 - RNA, 20 nt, synthetic construct
  source 1..20: mol_type = other RNA
tttttttcagtacttttaag

SEQ ID NO: 7046 - RNA, 20 nt, synthetic construct
  source 1..20: mol_type = other RNA
ctatgaatggtaggaaaaaa

SEQ ID NO: 7047 - RNA, 20 nt, synthetic construct
  source 1..20: mol_type = other RNA
ctctcaagatcatgctgtcc

SEQ ID NO: 7048 - RNA, 20 nt, synthetic construct
  source 1..20: mol_type = other RNA
tgagagtgatgttcagcagc

SEQ ID NO: 7049 - RNA, 20 nt, synthetic construct
  source 1..20: mol_type = other RNA
tgctgtccttttgtaaacca

SEQ ID NO: 7050 - RNA, 20 nt, synthetic construct
  source 1..20: mol_type = other RNA
gtggaataagacgaatatca

SEQ ID NO: 7051 - RNA, 20 nt, synthetic construct
  source 1..20: mol_type = other RNA
ccctataactaagatccatt

SEQ ID NO: 7052 - RNA, 20 nt, synthetic construct
  source 1..20: mol_type = other RNA
tagttatagggtgatattcg

SEQ ID NO: 7053 - RNA, 20 nt, synthetic construct
  source 1..20: mol_type = other RNA
atttcaggcacatacatatt

SEQ ID NO: 7054 - RNA, 20 nt, synthetic construct
  source 1..20: mol_type = other RNA
acaataccaccttcttacct

SEQ ID NO: 7055 - RNA, 20 nt, synthetic construct
  source 1..20: mol_type = other RNA
aattcacaaacatcctggcc

SEQ ID NO: 7056 - RNA, 20 nt, synthetic construct
  source 1..20: mol_type = other RNA
tggccagttacaagacactc

SEQ ID NO: 7057 - RNA, 20 nt, synthetic construct
  source 1..20: mol_type = other RNA
gggagtgtcttgtaactggc

SEQ ID NO: 7058 - RNA, 20 nt, synthetic construct
  source 1..20: mol_type = other RNA
ccttggcacgattccagccc

SEQ ID NO: 7059 - RNA, 20 nt, synthetic construct
  source 1..20: mol_type = other RNA
tgccaaggagatctgggagt

SEQ ID NO: 7060 - RNA, 20 nt, synthetic construct
  source 1..20: mol_type = other RNA
gggctggaatcgtgccaagg

SEQ ID NO: 7061 - RNA, 20 nt, synthetic construct
  source 1..20: mol_type = other RNA
aaaatttctagcgtttttct

SEQ ID NO: 7062 - RNA, 20 nt, synthetic construct
  source 1..20: mol_type = other RNA
tgaagcaaaaacacaaggcc

SEQ ID NO: 7063 - RNA, 20 nt, synthetic construct
  source 1..20: mol_type = other RNA
ggccttgtgtttttgcttca

SEQ ID NO: 7064 - RNA, 20 nt, synthetic construct
  source 1..20: mol_type = other RNA
actagtgtcgagccacttaa

SEQ ID NO: 7065 - RNA, 20 nt, synthetic construct
  source 1..20: mol_type = other RNA
gcttgcagctgctgtggccg

SEQ ID NO: 7066 - RNA, 20 nt, synthetic construct
  source 1..20: mol_type = other RNA
cttgtcatcggcttgcagct

SEQ ID NO: 7067 - RNA, 20 nt, synthetic construct
  source 1..20: mol_type = other RNA
aacttcccgttaccaatttc

SEQ ID NO: 7068 - RNA, 20 nt, synthetic construct
  source 1..20: mol_type = other RNA
aaagcaagacaaggtaaggg

SEQ ID NO: 7069 - RNA, 20 nt, synthetic construct
  source 1..20: mol_type = other RNA
ccagtttgtatgggtggtac

SEQ ID NO: 7070 - RNA, 20 nt, synthetic construct
  source 1..20: mol_type = other RNA
cagcttaataatccccagtt

SEQ ID NO: 7071 - RNA, 20 nt, synthetic construct
  source 1..20: mol_type = other RNA
gctgtttatttctaaattta

SEQ ID NO: 7072 - RNA, 20 nt, synthetic construct
  source 1..20: mol_type = other RNA
ggtttactgttacacatttt

SEQ ID NO: 7073 - RNA, 20 nt, synthetic construct
  source 1..20: mol_type = other RNA
ccatgcactcataattcagt

SEQ ID NO: 7074 - RNA, 20 nt, synthetic construct
  source 1..20: mol_type = other RNA
actcctgtttgcagttctta

SEQ ID NO: 7075 - RNA, 20 nt, synthetic construct
  source 1..20: mol_type = other RNA
gcaaaaaacagacaacaagg

SEQ ID NO: 7076 - RNA, 20 nt, synthetic construct
  source 1..20: mol_type = other RNA
tctgaagttgctaattcctt

SEQ ID NO: 7077 - RNA, 20 nt, synthetic construct
  source 1..20: mol_type = other RNA
atcctctgaagttgctaatt

SEQ ID NO: 7078 - RNA, 20 nt, synthetic construct
  source 1..20: mol_type = other RNA
gtttattttgtgtcaacatg

SEQ ID NO: 7079 - RNA, 20 nt, synthetic construct
  source 1..20: mol_type = other RNA
aagttaagctttggccatca

SEQ ID NO: 7080 - RNA, 20 nt, synthetic construct
  source 1..20: mol_type = other RNA
tagaaagcaatattcttact

SEQ ID NO: 7081 - RNA, 20 nt, synthetic construct
  source 1..20: mol_type = other RNA
tagtcatataatcatagaaa

SEQ ID NO: 7082 - RNA, 20 nt, synthetic construct
  source 1..20: mol_type = other RNA
ttggtatcctagtcatataa

SEQ ID NO: 7083 - RNA, 20 nt, synthetic construct
  source 1..20: mol_type = other RNA
tatcattggtatcctagtca

SEQ ID NO: 7084 - RNA, 20 nt, synthetic construct
  source 1..20: mol_type = other RNA
agacactggtagtggtctaa

SEQ ID NO: 7085 - RNA, 20 nt, synthetic construct
  source 1..20: mol_type = other RNA
gtatttcctagttaaaacac

SEQ ID NO: 7086 - RNA, 20 nt, synthetic construct
  source 1..20: mol_type = other RNA
agatcgtcatagtacagatc

SEQ ID NO: 7087 - RNA, 20 nt, synthetic construct
  source 1..20: mol_type = other RNA
ggattgtcatataccagttt

SEQ ID NO: 7088 - RNA, 20 nt, synthetic construct
  source 1..20: mol_type = other RNA
tcatagtacagatctaaaaa

SEQ ID NO: 7089 - RNA, 20 nt, synthetic construct
  source 1..20: mol_type = other RNA
ttcaaactatgaaatttcaa

SEQ ID NO: 7090 - RNA, 20 nt, synthetic construct
  source 1..20: mol_type = other RNA
cactattgaatatgtaaatg

SEQ ID NO: 7091 - RNA, 20 nt, synthetic construct
  source 1..20: mol_type = other RNA
ctatgaggcaaggaaaaaag

SEQ ID NO: 7092 - RNA, 20 nt, synthetic construct
  source 1..20: mol_type = other RNA
gccaatcctcaatcagcaaa

SEQ ID NO: 7093 - RNA, 20 nt, synthetic construct
  source 1..20: mol_type = other RNA
tcaatcagcaaatactgtat

SEQ ID NO: 7094 - RNA, 20 nt, synthetic construct
  source 1..20: mol_type = other RNA
gcaaatactgtatttcctag

SEQ ID NO: 7095 - RNA, 20 nt, synthetic construct
  source 1..20: mol_type = other RNA
aggaaatacagtatttgctg

SEQ ID NO: 7096 - RNA, 20 nt, synthetic construct
  source 1..20: mol_type = other RNA
ttgtcttagaatctaggaaa

SEQ ID NO: 7097 - RNA, 20 nt, synthetic construct
  source 1..20: mol_type = other RNA
gaaattgacactttagacaa

SEQ ID NO: 7098 - RNA, 20 nt, synthetic construct
  source 1..20: mol_type = other RNA
acatgcctcaaaattataca

SEQ ID NO: 7099 - RNA, 20 nt, synthetic construct
  source 1..20: mol_type = other RNA
gagatgcagggtgcaatcac

SEQ ID NO: 7100 - RNA, 20 nt, synthetic construct
  source 1..20: mol_type = other RNA
cagatttaataaacttgcaa

SEQ ID NO: 7101 - RNA, 20 nt, synthetic construct
  source 1..20: mol_type = other RNA
ctggcatcttagaatcacag

SEQ ID NO: 7102 - RNA, 20 nt, synthetic construct
  source 1..20: mol_type = other RNA
tagaatcacagaaataaggt

SEQ ID NO: 7103 - RNA, 20 nt, synthetic construct
  source 1..20: mol_type = other RNA
cagaaataaggtatatatta

SEQ ID NO: 7104 - RNA, 20 nt, synthetic construct
  source 1..20: mol_type = other RNA
aaacagataccttcccaaaa

SEQ ID NO: 7105 - RNA, 20 nt, synthetic construct
  source 1..20: mol_type = other RNA
gtttggatataaaccttaca

SEQ ID NO: 7106 - RNA, 20 nt, synthetic construct
  source 1..20: mol_type = other RNA
ttttgggaaggtatctgttt

SEQ ID NO: 7107 - RNA, 20 nt, synthetic construct
  source 1..20: mol_type = other RNA
tgatggccaattaagtcaat

SEQ ID NO: 7108 - RNA, 20 nt, synthetic construct
  source 1..20: mol_type = other RNA
tgatactttttaatatattt

SEQ ID NO: 7109 - RNA, 20 nt, synthetic construct
  source 1..20: mol_type = other RNA
tttgaaggtaacttgttata

SEQ ID NO: 7110 - RNA, 20 nt, synthetic construct
  source 1..20: mol_type = other RNA
gaaataattcttaaatttta

SEQ ID NO: 7111 - RNA, 20 nt, synthetic construct
  source 1..20: mol_type = other RNA
ttcctgtttgctaaacttta

SEQ ID NO: 7112 - RNA, 20 nt, synthetic construct
  source 1..20: mol_type = other RNA
tatctatgacgtggtgacaa

SEQ ID NO: 7113 - RNA, 20 nt, synthetic construct
  source 1..20: mol_type = other RNA
atgacgtggtgacaagttat

SEQ ID NO: 7114 - RNA, 20 nt, synthetic construct
  source 1..20: mol_type = other RNA
tcattgtaattggagaagag

SEQ ID NO: 7115 - RNA, 20 nt, synthetic construct
  source 1..20: mol_type = other RNA
gataatgtcacagagtggag

SEQ ID NO: 7116 - RNA, 20 nt, synthetic construct
  source 1..20: mol_type = other RNA
gatatcttcattgtaattgg

SEQ ID NO: 7117 - RNA, 20 nt, synthetic construct
  source 1..20: mol_type = other RNA
ccactctgtgacattatcag

SEQ ID NO: 7118 - RNA, 20 nt, synthetic construct
  source 1..20: mol_type = other RNA
ggtcctacttatgaaatctc

SEQ ID NO: 7119 - RNA, 20 nt, synthetic construct
  source 1..20: mol_type = other RNA
catcaggtcctacttatgaa

SEQ ID NO: 7120 - RNA, 20 nt, synthetic construct
  source 1..20: mol_type = other RNA
aatgttgagtccaatttaga

SEQ ID NO: 7121 - RNA, 20 nt, synthetic construct
  source 1..20: mol_type = other RNA
atgacattctgatgattcag

SEQ ID NO: 7122 - RNA, 20 nt, synthetic construct
  source 1..20: mol_type = other RNA
tttaaactagattctgatcc

SEQ ID NO: 7123 - RNA, 20 nt, synthetic construct
  source 1..20: mol_type = other RNA
gctttgcgcttgaattaact

SEQ ID NO: 7124 - RNA, 20 nt, synthetic construct
  source 1..20: mol_type = other RNA
aaatggaatggggccagtgt

SEQ ID NO: 7125 - RNA, 20 nt, synthetic construct
  source 1..20: mol_type = other RNA
gtggtaagaattaggatgga

SEQ ID NO: 7126 - RNA, 20 nt, synthetic construct
  source 1..20: mol_type = other RNA
tacacataaaaagttgtatc

SEQ ID NO: 7127 - RNA, 20 nt, synthetic construct
  source 1..20: mol_type = other RNA
taggatacaactttttatgt

SEQ ID NO: 7128 - RNA, 20 nt, synthetic construct
  source 1..20: mol_type = other RNA
cctaggatacaactttttat

SEQ ID NO: 7129 - RNA, 20 nt, synthetic construct
  source 1..20: mol_type = other RNA
ttgtcaactgtcactgacat

SEQ ID NO: 7130 - RNA, 20 nt, synthetic construct
  source 1..20: mol_type = other RNA
ccttgtcaactgtcactgac

SEQ ID NO: 7131 - RNA, 20 nt, synthetic construct
  source 1..20: mol_type = other RNA
tctggaagaagatgcccaat

SEQ ID NO: 7132 - RNA, 20 nt, synthetic construct
  source 1..20: mol_type = other RNA
ccagtaatttttatatttct

SEQ ID NO: 7133 - RNA, 20 nt, synthetic construct
  source 1..20: mol_type = other RNA
agtaatttttatatttctca

SEQ ID NO: 7134 - RNA, 20 nt, synthetic construct
  source 1..20: mol_type = other RNA
gtccaacccattcctgaatc

SEQ ID NO: 7135 - RNA, 20 nt, synthetic construct
  source 1..20: mol_type = other RNA
tcctttcttcctagtttcat

SEQ ID NO: 7136 - RNA, 20 nt, synthetic construct
  source 1..20: mol_type = other RNA
atatagtaaggaaagaaaaa

SEQ ID NO: 7137 - RNA, 20 nt, synthetic construct
  source 1..20: mol_type = other RNA
cttaaaggaagcactctcct

SEQ ID NO: 7138 - RNA, 20 nt, synthetic construct
  source 1..20: mol_type = other RNA
cctcacaggtctccctgaag

SEQ ID NO: 7139 - RNA, 20 nt, synthetic construct
  source 1..20: mol_type = other RNA
tcacaggtctccctgaagcc

SEQ ID NO: 7140 - RNA, 20 nt, synthetic construct
  source 1..20: mol_type = other RNA
caggtctccctgaagccatc

SEQ ID NO: 7141 - RNA, 20 nt, synthetic construct
  source 1..20: mol_type = other RNA
ctgaagccatcgtgcccact

SEQ ID NO: 7142 - RNA, 20 nt, synthetic construct
  source 1..20: mol_type = other RNA
aattcatcctccatgtggca

SEQ ID NO: 7143 - RNA, 20 nt, synthetic construct
  source 1..20: mol_type = other RNA
atgtggcaccgagtggtctt

SEQ ID NO: 7144 - RNA, 20 nt, synthetic construct
  source 1..20: mol_type = other RNA
aggtctttgtacataccatt

SEQ ID NO: 7145 - RNA, 20 nt, synthetic construct
  source 1..20: mol_type = other RNA
ctcatttagacattcttcag

SEQ ID NO: 7146 - RNA, 20 nt, synthetic construct
  source 1..20: mol_type = other RNA
catttagacattcttcagaa

SEQ ID NO: 7147 - RNA, 20 nt, synthetic construct
  source 1..20: mol_type = other RNA
tttagacattcttcagaact

SEQ ID NO: 7148 - RNA, 20 nt, synthetic construct
  source 1..20: mol_type = other RNA
gctcaaaagttacttcctca

SEQ ID NO: 7149 - RNA, 20 nt, synthetic construct
  source 1..20: mol_type = other RNA
aaagttacttcctcaaggaa

SEQ ID NO: 7150 - RNA, 20 nt, synthetic construct
  source 1..20: mol_type = other RNA
aggaagcctttcctgacatt

SEQ ID NO: 7151 - RNA, 20 nt, synthetic construct
  source 1..20: mol_type = other RNA
gtaaagatacccaaaaatgt

SEQ ID NO: 7152 - RNA, 20 nt, synthetic construct
  source 1..20: mol_type = other RNA
gaagaagacaggaaaatgtg

SEQ ID NO: 7153 - RNA, 20 nt, synthetic construct
  source 1..20: mol_type = other RNA
aggaagttccaaactttccc

SEQ ID NO: 7154 - RNA, 20 nt, synthetic construct
  source 1..20: mol_type = other RNA
gcctggatttcattgtccat

SEQ ID NO: 7155 - RNA, 20 nt, synthetic construct
  source 1..20: mol_type = other RNA
gatggagatgaggaacttgt

SEQ ID NO: 7156 - RNA, 20 nt, synthetic construct
  source 1..20: mol_type = other RNA
atctgagactacctcagcct

SEQ ID NO: 7157 - RNA, 20 nt, synthetic construct
  source 1..20: mol_type = other RNA
tctccatctgagactacctc

SEQ ID NO: 7158 - RNA, 20 nt, synthetic construct
  source 1..20: mol_type = other RNA
agttcccaacaagttcctca

SEQ ID NO: 7159 - RNA, 20 nt, synthetic construct
  source 1..20: mol_type = other RNA
tgctatattttagtaaacag

SEQ ID NO: 7160 - RNA, 20 nt, synthetic construct
  source 1..20: mol_type = other RNA
aaggcaggggcaaaatgcca

SEQ ID NO: 7161 - RNA, 20 nt, synthetic construct
  source 1..20: mol_type = other RNA
tgaatgctttgctgcttaga

SEQ ID NO: 7162 - RNA, 20 nt, synthetic construct
  source 1..20: mol_type = other RNA
acttcattttaaaactgaat

SEQ ID NO: 7163 - RNA, 20 nt, synthetic construct
  source 1..20: mol_type = other RNA
gaaaatgggtttttcttttc

SEQ ID NO: 7164 - RNA, 20 nt, synthetic construct
  source 1..20: mol_type = other RNA
tgtgtcagcatgacccggct

SEQ ID NO: 7165 - RNA, 20 nt, synthetic construct
  source 1..20: mol_type = other RNA
cagccgggtcatgctgacac

SEQ ID NO: 7166 - RNA, 20 nt, synthetic construct
  source 1..20: mol_type = other RNA
atgtctcacagccgggtcat

SEQ ID NO: 7167 - RNA, 20 nt, synthetic construct
  source 1..20: mol_type = other RNA
tttcactccatgtctcacag

SEQ ID NO: 7168 - RNA, 20 nt, synthetic construct
  source 1..20: mol_type = other RNA
aaaatgatctcctttcactc

SEQ ID NO: 7169 - RNA, 20 nt, synthetic construct
  source 1..20: mol_type = other RNA
caaagtattgggattacagg

SEQ ID NO: 7170 - RNA, 20 nt, synthetic construct
  source 1..20: mol_type = other RNA
acctcccaaagtattgggat

SEQ ID NO: 7171 - RNA, 20 nt, synthetic construct
  source 1..20: mol_type = other RNA
agtgatccacccacctcaac

SEQ ID NO: 7172 - RNA, 20 nt, synthetic construct
  source 1..20: mol_type = other RNA
tgggctcaagtgatccaccc

SEQ ID NO: 7173 - RNA, 20 nt, synthetic construct
  source 1..20: mol_type = other RNA
aactcctgggctcaagtgat

SEQ ID NO: 7174 - RNA, 20 nt, synthetic construct
  source 1..20: mol_type = other RNA
tggggttaaaaacgaaagct

SEQ ID NO: 7175 - RNA, 20 nt, synthetic construct
  source 1..20: mol_type = other RNA
ccctgtgaggccacaaggtg

SEQ ID NO: 7176 - RNA, 20 nt, synthetic construct
  source 1..20: mol_type = other RNA
ctgtgaggccacaaggtggc

SEQ ID NO: 7177 - RNA, 20 nt, synthetic construct
  source 1..20: mol_type = other RNA
cagggagagctttcgttttt

SEQ ID NO: 7178 - RNA, 20 nt, synthetic construct
  source 1..20: mol_type = other RNA
ttgacttgctgctttgtgct

SEQ ID NO: 7179 - RNA, 20 nt, synthetic construct
  source 1..20: mol_type = other RNA
actgccttcttgagaggacc

SEQ ID NO: 7180 - RNA, 20 nt, synthetic construct
  source 1..20: mol_type = other RNA
cgcctataatcccagcactt

SEQ ID NO: 7181 - RNA, 20 nt, synthetic construct
  source 1..20: mol_type = other RNA
ttagtttcctaaaatgaaca

SEQ ID NO: 7182 - RNA, 20 nt, synthetic construct
  source 1..20: mol_type = other RNA
tctaaattgggttttaacag

SEQ ID NO: 7183 - RNA, 20 nt, synthetic construct
  source 1..20: mol_type = other RNA
ggaaaaaaaaaaaatcaatt

SEQ ID NO: 7184 - RNA, 20 nt, synthetic construct
  source 1..20: mol_type = other RNA
gtggcaaaatgaaagcaggc

SEQ ID NO: 7185 - RNA, 20 nt, synthetic construct
  source 1..20: mol_type = other RNA
gggccttgtttaactctgtg

SEQ ID NO: 7186 - RNA, 20 nt, synthetic construct
  source 1..20: mol_type = other RNA
ctgggccttgtttaactctg

SEQ ID NO: 7187 - RNA, 20 nt, synthetic construct
  source 1..20: mol_type = other RNA
accacatagtttgctgtgta

SEQ ID NO: 7188 - RNA, 20 nt, synthetic construct
  source 1..20: mol_type = other RNA
ctgccaagtactccttttca

SEQ ID NO: 7189 - RNA, 20 nt, synthetic construct
  source 1..20: mol_type = other RNA
ccatcactccctgccaagta

SEQ ID NO: 7190 - RNA, 20 nt, synthetic construct
  source 1..20: mol_type = other RNA
ccccttctccccatcactcc

SEQ ID NO: 7191 - RNA, 20 nt, synthetic construct
  source 1..20: mol_type = other RNA
tttccagaaaccaaggaagt

SEQ ID NO: 7192 - RNA, 20 nt, synthetic construct
  source 1..20: mol_type = other RNA
gtgtgtttgcagctgctcca

SEQ ID NO: 7193 - RNA, 20 nt, synthetic construct
  source 1..20: mol_type = other RNA
aggttatgtggagattgtct

SEQ ID NO: 7194 - RNA, 20 nt, synthetic construct
  source 1..20: mol_type = other RNA
acataacctggagcagctgc

SEQ ID NO: 7195 - RNA, 20 nt, synthetic construct
  source 1..20: mol_type = other RNA
cggggcctgggaagcacaat

SEQ ID NO: 7196 - RNA, 20 nt, synthetic construct
  source 1..20: mol_type = other RNA
attaccgcaactcctcaatt

SEQ ID NO: 7197 - RNA, 20 nt, synthetic construct
  source 1..20: mol_type = other RNA
tcaattagacatgtgatggc

SEQ ID NO: 7198 - RNA, 20 nt, synthetic construct
  source 1..20: mol_type = other RNA
attagacatgtgatggcgga

SEQ ID NO: 7199 - RNA, 20 nt, synthetic construct
  source 1..20: mol_type = other RNA
cgcagcctgggaaacagggt

SEQ ID NO: 7200 - RNA, 20 nt, synthetic construct
  source 1..20: mol_type = other RNA
ctgagcatttcggcgtcaga

SEQ ID NO: 7201 - RNA, 20 nt, synthetic construct
  source 1..20: mol_type = other RNA
gggagacggatttgagtaat

SEQ ID NO: 7202 - RNA, 20 nt, synthetic construct
  source 1..20: mol_type = other RNA
gacgccgaaatgctcaggga

SEQ ID NO: 7203 - RNA, 20 nt, synthetic construct
  source 1..20: mol_type = other RNA
ccacttccgaagcccctacc

SEQ ID NO: 7204 - RNA, 20 nt, synthetic construct
  source 1..20: mol_type = other RNA
ccaaccagcactccccactt

SEQ ID NO: 7205 - RNA, 20 nt, synthetic construct
  source 1..20: mol_type = other RNA
aatctcaccaaccagcactc

SEQ ID NO: 7206 - RNA, 20 nt, synthetic construct
  source 1..20: mol_type = other RNA
accagttctgccatcccacc

SEQ ID NO: 7207 - RNA, 20 nt, synthetic construct
  source 1..20: mol_type = other RNA
atggatcagctgacaccacc

SEQ ID NO: 7208 - RNA, 20 nt, synthetic construct
  source 1..20: mol_type = other RNA
tcctgtgacttagaatgcct

SEQ ID NO: 7209 - RNA, 20 nt, synthetic construct
  source 1..20: mol_type = other RNA
tatctcatcctgtgacttag

SEQ ID NO: 7210 - RNA, 20 nt, synthetic construct
  source 1..20: mol_type = other RNA
ccaagacagaacaggatacc

SEQ ID NO: 7211 - RNA, 20 nt, synthetic construct
  source 1..20: mol_type = other RNA
aagacagaacaggatacctg

SEQ ID NO: 7212 - RNA, 20 nt, synthetic construct
  source 1..20: mol_type = other RNA
attcaccaggaccagccaac

SEQ ID NO: 7213 - RNA, 20 nt, synthetic construct
  source 1..20: mol_type = other RNA
tgttatggttttgcaaaggc

SEQ ID NO: 7214 - RNA, 20 nt, synthetic construct
  source 1..20: mol_type = other RNA
aaagaagaaaaaccagacta

SEQ ID NO: 7215 - RNA, 20 nt, synthetic construct
  source 1..20: mol_type = other RNA
ccaaagaagaaaaaccagac

SEQ ID NO: 7216 - RNA, 20 nt, synthetic construct
  source 1..20: mol_type = other RNA
ctccaaagaagaaaaaccag

SEQ ID NO: 7217 - RNA, 20 nt, synthetic construct
  source 1..20: mol_type = other RNA
cttggtgtctctctccaaag

SEQ ID NO: 7218 - RNA, 20 nt, synthetic construct
  source 1..20: mol_type = other RNA
actctgctaagccagagaat

SEQ ID NO: 7219 - RNA, 20 nt, synthetic construct
  source 1..20: mol_type = other RNA
gctaagccagagaatggctg

SEQ ID NO: 7220 - RNA, 20 nt, synthetic construct
  source 1..20: mol_type = other RNA
cggccacaatgctatacttc

SEQ ID NO: 7221 - RNA, 20 nt, synthetic construct
  source 1..20: mol_type = other RNA
gaagccacactgggttcaat

SEQ ID NO: 7222 - RNA, 20 nt, synthetic construct
  source 1..20: mol_type = other RNA
acttcttgttaaagctatgt

SEQ ID NO: 7223 - RNA, 20 nt, synthetic construct
  source 1..20: mol_type = other RNA
aagtagagatgcaatagaga

SEQ ID NO: 7224 - RNA, 20 nt, synthetic construct
  source 1..20: mol_type = other RNA
acttagagggcaaagtaaga

SEQ ID NO: 7225 - RNA, 20 nt, synthetic construct
  source 1..20: mol_type = other RNA
attgcatctctacttagagg

SEQ ID NO: 7226 - RNA, 20 nt, synthetic construct
  source 1..20: mol_type = other RNA
ctattgcatctctacttaga

SEQ ID NO: 7227 - RNA, 20 nt, synthetic construct
  source 1..20: mol_type = other RNA
ctctctattgcatctctact

SEQ ID NO: 7228 - RNA, 20 nt, synthetic construct
  source 1..20: mol_type = other RNA
gaagcactttacatatgtaa

SEQ ID NO: 7229 - RNA, 20 nt, synthetic construct
  source 1..20: mol_type = other RNA
tcaagacctgactaagatgt

SEQ ID NO: 7230 - RNA, 20 nt, synthetic construct
  source 1..20: mol_type = other RNA
tattcactcttcaagacctg

SEQ ID NO: 7231 - RNA, 20 nt, synthetic construct
  source 1..20: mol_type = other RNA
ggataaggaggagggaaagg

SEQ ID NO: 7232 - RNA, 20 nt, synthetic construct
  source 1..20: mol_type = other RNA
ttatccagagaactcttatt

SEQ ID NO: 7233 - RNA, 20 nt, synthetic construct
  source 1..20: mol_type = other RNA
tccttatccagagaactctt

SEQ ID NO: 7234 - RNA, 20 nt, synthetic construct
  source 1..20: mol_type = other RNA
tgcccagaatgcctttccct

SEQ ID NO: 7235 - RNA, 20 nt, synthetic construct
  source 1..20: mol_type = other RNA
ttcctcatctcagtgggaaa

SEQ ID NO: 7236 - RNA, 20 nt, synthetic construct
  source 1..20: mol_type = other RNA
tctcagtgggaaaactttca

SEQ ID NO: 7237 - RNA, 20 nt, synthetic construct
  source 1..20: mol_type = other RNA
gtgggaaaactttcaatatt

SEQ ID NO: 7238 - RNA, 20 nt, synthetic construct
  source 1..20: mol_type = other RNA
atatgggaaccccttagttt

SEQ ID NO: 7239 - RNA, 20 nt, synthetic construct
  source 1..20: mol_type = other RNA
gacttttagcatccttataa

SEQ ID NO: 7240 - RNA, 20 nt, synthetic construct
  source 1..20: mol_type = other RNA
gtacctgggtgtaatctccg

SEQ ID NO: 7241 - RNA, 20 nt, synthetic construct
  source 1..20: mol_type = other RNA
cggtacctgggtgtaatctc

SEQ ID NO: 7242 - RNA, 20 nt, synthetic construct
  source 1..20: mol_type = other RNA
tagtaggctctggagggaaa

SEQ ID NO: 7243 - RNA, 20 nt, synthetic construct
  source 1..20: mol_type = other RNA
ggagggaaagcatgcaaagt

SEQ ID NO: 7244 - RNA, 20 nt, synthetic construct
  source 1..20: mol_type = other RNA
agagcctactatgagctttc

SEQ ID NO: 7245 - RNA, 20 nt, synthetic construct
  source 1..20: mol_type = other RNA
gaccttaggtgggcacaggt

SEQ ID NO: 7246 - RNA, 20 nt, synthetic construct
  source 1..20: mol_type = other RNA
cttcttagaacagcagcaca

SEQ ID NO: 7247 - RNA, 20 nt, synthetic construct
  source 1..20: mol_type = other RNA
cctttggtgctgtttggagc

SEQ ID NO: 7248 - RNA, 20 nt, synthetic construct
  source 1..20: mol_type = other RNA
tttggtgctgtttggagccc

SEQ ID NO: 7249 - RNA, 20 nt, synthetic construct
  source 1..20: mol_type = other RNA
aaacagcaccaaaggagagt

SEQ ID NO: 7250 - RNA, 20 nt, synthetic construct
  source 1..20: mol_type = other RNA
ttggagtctggggaaattcg

SEQ ID NO: 7251 - RNA, 20 nt, synthetic construct
  source 1..20: mol_type = other RNA
aaagagtgctggggctccaa

SEQ ID NO: 7252 - RNA, 20 nt, synthetic construct
  source 1..20: mol_type = other RNA
ttgtttttactttgtttgca

SEQ ID NO: 7253 - RNA, 20 nt, synthetic construct
  source 1..20: mol_type = other RNA
tggctaaggttccaagctat

SEQ ID NO: 7254 - RNA, 20 nt, synthetic construct
  source 1..20: mol_type = other RNA
cagcaatacaaagacatgta

SEQ ID NO: 7255 - RNA, 20 nt, synthetic construct
  source 1..20: mol_type = other RNA
catttgtcaaaagaaagcac

SEQ ID NO: 7256 - RNA, 20 nt, synthetic construct
  source 1..20: mol_type = other RNA
aaatcttcccttcagcctag

SEQ ID NO: 7257 - RNA, 20 nt, synthetic construct
  source 1..20: mol_type = other RNA
cactctaaatcttcccttca

SEQ ID NO: 7258 - RNA, 20 nt, synthetic construct
  source 1..20: mol_type = other RNA
agcagctcccactctaaatc

SEQ ID NO: 7259 - RNA, 20 nt, synthetic construct
  source 1..20: mol_type = other RNA
cattctattcaaagtctcac

SEQ ID NO: 7260 - RNA, 20 nt, synthetic construct
  source 1..20: mol_type = other RNA
ctaagataaatgcatatcta

SEQ ID NO: 7261 - RNA, 20 nt, synthetic construct
  source 1..20: mol_type = other RNA
tttggaaaggctaatcagaa

SEQ ID NO: 7262 - RNA, 20 nt, synthetic construct
  source 1..20: mol_type = other RNA
aagcgggagaggggacttgg

SEQ ID NO: 7263 - RNA, 20 nt, synthetic construct
  source 1..20: mol_type = other RNA
tgcctcccttgttaaaagtg

SEQ ID NO: 7264 - RNA, 20 nt, synthetic construct
  source 1..20: mol_type = other RNA
cttgttaaaagtgaaagaat

SEQ ID NO: 7265 - RNA, 20 nt, synthetic construct
  source 1..20: mol_type = other RNA
attctttcacttttaacaag

SEQ ID NO: 7266 - RNA, 20 nt, synthetic construct
  source 1..20: mol_type = other RNA
ctaataacccttttgggcac

SEQ ID NO: 7267 - RNA, 20 nt, synthetic construct
  source 1..20: mol_type = other RNA
cctactacttaatggttcct

SEQ ID NO: 7268 - RNA, 20 nt, synthetic construct
  source 1..20: mol_type = other RNA
aattctttatcaggttttaa

SEQ ID NO: 7269 - RNA, 20 nt, synthetic construct
  source 1..20: mol_type = other RNA
tagtcttgattaaaataaaa

SEQ ID NO: 7270 - RNA, 20 nt, synthetic construct
  source 1..20: mol_type = other RNA
gctagattttgtttatgtat

SEQ ID NO: 7271 - RNA, 20 nt, synthetic construct
  source 1..20: mol_type = other RNA
actaaaaatacaaaaattag

SEQ ID NO: 7272 - RNA, 20 nt, synthetic construct
  source 1..20: mol_type = other RNA
tgccaccatgcccagctaat

SEQ ID NO: 7273 - RNA, 20 nt, synthetic construct
  source 1..20: mol_type = other RNA
caagtagctgggattacagg

SEQ ID NO: 7274 - RNA, 20 nt, synthetic construct
  source 1..20: mol_type = other RNA
gcctcccaagtagctgggat

SEQ ID NO: 7275 - RNA, 20 nt, synthetic construct
  source 1..20: mol_type = other RNA
gcctcagcctcccaagtagc

SEQ ID NO: 7276 - RNA, 20 nt, synthetic construct
  source 1..20: mol_type = other RNA
attaattcctgcggacctga

SEQ ID NO: 7277 - RNA, 20 nt, synthetic construct
  source 1..20: mol_type = other RNA
acacacttaacgtatcaaga

SEQ ID NO: 7278 - RNA, 20 nt, synthetic construct
  source 1..20: mol_type = other RNA
cacaaatagaatttaagaca

SEQ ID NO: 7279 - RNA, 20 nt, synthetic construct
  source 1..20: mol_type = other RNA
caaatagaatttaagacata

SEQ ID NO: 7280 - RNA, 20 nt, synthetic construct
  source 1..20: mol_type = other RNA
agggctactcagggagagag

SEQ ID NO: 7281 - RNA, 20 nt, synthetic construct
  source 1..20: mol_type = other RNA
gggagagagagcccagaaac

SEQ ID NO: 7282 - RNA, 20 nt, synthetic construct
  source 1..20: mol_type = other RNA
ctgagtagccctggagaccc

SEQ ID NO: 7283 - RNA, 20 nt, synthetic construct
  source 1..20: mol_type = other RNA
ccctgagtagccctggagac

SEQ ID NO: 7284 - RNA, 20 nt, synthetic construct
  source 1..20: mol_type = other RNA
ctccctgagtagccctggag

SEQ ID NO: 7285 - RNA, 20 nt, synthetic construct
  source 1..20: mol_type = other RNA
ctctccctgagtagccctgg

SEQ ID NO: 7286 - RNA, 20 nt, synthetic construct
  source 1..20: mol_type = other RNA
ggtctctttctctctgtgca

SEQ ID NO: 7287 - RNA, 20 nt, synthetic construct
  source 1..20: mol_type = other RNA
ttctctctgtgcaaactggt

SEQ ID NO: 7288 - RNA, 20 nt, synthetic construct
  source 1..20: mol_type = other RNA
ctgtgcaaactggttaaatg

SEQ ID NO: 7289 - RNA, 20 nt, synthetic construct
  source 1..20: mol_type = other RNA
gtgcaaactggttaaatgaa

SEQ ID NO: 7290 - RNA, 20 nt, synthetic construct
  source 1..20: mol_type = other RNA
tattattattaaaccaatta

SEQ ID NO: 7291 - RNA, 20 nt, synthetic construct
  source 1..20: mol_type = other RNA
cgtcacatgaattaaataaa

SEQ ID NO: 7292 - RNA, 20 nt, synthetic construct
  source 1..20: mol_type = other RNA
tgcatgggaaagcttttatc

SEQ ID NO: 7293 - RNA, 20 nt, synthetic construct
  source 1..20: mol_type = other RNA
taaaaccaaatagatcaaag

SEQ ID NO: 7294 - RNA, 20 nt, synthetic construct
  source 1..20: mol_type = other RNA
gaattcttggtattatcctc

SEQ ID NO: 7295 - RNA, 20 nt, synthetic construct
  source 1..20: mol_type = other RNA
caatagtaataataatagtc

SEQ ID NO: 7296 - RNA, 20 nt, synthetic construct
  source 1..20: mol_type = other RNA
ctggtgtgctgtattctctc

SEQ ID NO: 7297 - RNA, 20 nt, synthetic construct
  source 1..20: mol_type = other RNA
caaaggttttaaatgcttgc

SEQ ID NO: 7298 - RNA, 20 nt, synthetic construct
  source 1..20: mol_type = other RNA
aaggttttaaatgcttgcat

SEQ ID NO: 7299 - RNA, 20 nt, synthetic construct
  source 1..20: mol_type = other RNA
atttttgtttggtttggtct

SEQ ID NO: 7300 - RNA, 20 nt, synthetic construct
  source 1..20: mol_type = other RNA
tgcaaatctctatagcaaac

SEQ ID NO: 7301 - RNA, 20 nt, synthetic construct
  source 1..20: mol_type = other RNA
atagcaaacattcttgacaa

SEQ ID NO: 7302 - RNA, 20 nt, synthetic construct
  source 1..20: mol_type = other RNA
gttgtcaagaatgtttgcta

SEQ ID NO: 7303 - RNA, 20 nt, synthetic construct
  source 1..20: mol_type = other RNA
cctagagaccaccaagtttt

SEQ ID NO: 7304 - RNA, 20 nt, synthetic construct
  source 1..20: mol_type = other RNA
tagagaccaccaagttttag

SEQ ID NO: 7305 - RNA, 20 nt, synthetic construct
  source 1..20: mol_type = other RNA
aggagagaagaaatgaattt

SEQ ID NO: 7306 - RNA, 20 nt, synthetic construct
  source 1..20: mol_type = other RNA
gcctcccatgaagatttatg

SEQ ID NO: 7307 - RNA, 20 nt, synthetic construct
  source 1..20: mol_type = other RNA
catgaagatttatggggatc

SEQ ID NO: 7308 - RNA, 20 nt, synthetic construct
  source 1..20: mol_type = other RNA
tacagaggaaatgaggcagg

SEQ ID NO: 7309 - RNA, 20 nt, synthetic construct
  source 1..20: mol_type = other RNA
gtaagagatgtgatccccat

SEQ ID NO: 7310 - RNA, 20 nt, synthetic construct
  source 1..20: mol_type = other RNA
tttcctctgtaagagatgtg

SEQ ID NO: 7311 - RNA, 20 nt, synthetic construct
  source 1..20: mol_type = other RNA
agaccctattttcctgcctc

SEQ ID NO: 7312 - RNA, 20 nt, synthetic construct
  source 1..20: mol_type = other RNA
acaatgtgggaccggggccc

SEQ ID NO: 7313 - RNA, 20 nt, synthetic construct
  source 1..20: mol_type = other RNA
accggtaacaatagtgctga

SEQ ID NO: 7314 - RNA, 20 nt, synthetic construct
  source 1..20: mol_type = other RNA
gagggctgaagacacagaca

SEQ ID NO: 7315 - RNA, 20 nt, synthetic construct
  source 1..20: mol_type = other RNA
gaggctgtgcaccatctaaa

SEQ ID NO: 7316 - RNA, 20 nt, synthetic construct
  source 1..20: mol_type = other RNA
gcctagtgtctgtgtcttca

SEQ ID NO: 7317 - RNA, 20 nt, synthetic construct
  source 1..20: mol_type = other RNA
caacaccagcagagagctgg

SEQ ID NO: 7318 - RNA, 20 nt, synthetic construct
  source 1..20: mol_type = other RNA
acaccagcagagagctggcc

SEQ ID NO: 7319 - RNA, 20 nt, synthetic construct
  source 1..20: mol_type = other RNA
gctggtgttgagagctgttt

SEQ ID NO: 7320 - RNA, 20 nt, synthetic construct
  source 1..20: mol_type = other RNA
ctgctggtgttgagagctgt

SEQ ID NO: 7321 - RNA, 20 nt, synthetic construct
  source 1..20: mol_type = other RNA
aatgtctggagctgtagcag

SEQ ID NO: 7322 - RNA, 20 nt, synthetic construct
  source 1..20: mol_type = other RNA
agacattcgaggcagaacga

SEQ ID NO: 7323 - RNA, 20 nt, synthetic construct
  source 1..20: mol_type = other RNA
cgctgacacgatggctgcta

SEQ ID NO: 7324 - RNA, 20 nt, synthetic construct
  source 1..20: mol_type = other RNA
tgaagctgaaatttccataa

SEQ ID NO: 7325 - RNA, 20 nt, synthetic construct
  source 1..20: mol_type = other RNA
ggggcagaggggagctttct

SEQ ID NO: 7326 - RNA, 20 nt, synthetic construct
  source 1..20: mol_type = other RNA
gccccagagaaaggcagcgt

SEQ ID NO: 7327 - RNA, 20 nt, synthetic construct
  source 1..20: mol_type = other RNA
cctctgccccagagaaaggc

SEQ ID NO: 7328 - RNA, 20 nt, synthetic construct
  source 1..20: mol_type = other RNA
tagaaagctcccctctgccc

SEQ ID NO: 7329 - RNA, 20 nt, synthetic construct
  source 1..20: mol_type = other RNA
tcttagactcctagaaagct

SEQ ID NO: 7330 - RNA, 20 nt, synthetic construct
  source 1..20: mol_type = other RNA
caccaccagcccctcttctt

SEQ ID NO: 7331 - RNA, 20 nt, synthetic construct
  source 1..20: mol_type = other RNA
tgctcacaccaccagcccct

SEQ ID NO: 7332 - RNA, 20 nt, synthetic construct
  source 1..20: mol_type = other RNA
atcttcagagcccaatcagg

SEQ ID NO: 7333 - RNA, 20 nt, synthetic construct
  source 1..20: mol_type = other RNA
gaagatggagggtcacaggt

SEQ ID NO: 7334 - RNA, 20 nt, synthetic construct
  source 1..20: mol_type = other RNA
actgaccccctgattgggct

SEQ ID NO: 7335 - RNA, 20 nt, synthetic construct
  source 1..20: mol_type = other RNA
gagagcacggctgagaatta

SEQ ID NO: 7336 - RNA, 20 nt, synthetic construct
  source 1..20: mol_type = other RNA
gagatcccccattctccact

SEQ ID NO: 7337 - RNA, 20 nt, synthetic construct
  source 1..20: mol_type = other RNA
cagagatcccccattctcca

SEQ ID NO: 7338 - RNA, 20 nt, synthetic construct
  source 1..20: mol_type = other RNA
gccgtgctctcagagatccc

SEQ ID NO: 7339 - RNA, 20 nt, synthetic construct
  source 1..20: mol_type = other RNA
aattctcagccgtgctctca

SEQ ID NO: 7340 - RNA, 20 nt, synthetic construct
  source 1..20: mol_type = other RNA
tcaggaaagggatggcttgg

SEQ ID NO: 7341 - RNA, 20 nt, synthetic construct
  source 1..20: mol_type = other RNA
ggaaagggatggcttggcag

SEQ ID NO: 7342 - RNA, 20 nt, synthetic construct
  source 1..20: mol_type = other RNA
tccttcccactgctgccaag

SEQ ID NO: 7343 - RNA, 20 nt, synthetic construct
  source 1..20: mol_type = other RNA
cctgaagttttgtgttttta

SEQ ID NO: 7344 - RNA, 20 nt, synthetic construct
  source 1..20: mol_type = other RNA
ataccatcagaattctcacc

SEQ ID NO: 7345 - RNA, 20 nt, synthetic construct
  source 1..20: mol_type = other RNA
gcctcctgagtagctgggat

SEQ ID NO: 7346 - RNA, 20 nt, synthetic construct
  source 1..20: mol_type = other RNA
tgagtagctgggattatagg

SEQ ID NO: 7347 - RNA, 20 nt, synthetic construct
  source 1..20: mol_type = other RNA
ggaggctgaggcaaaagaat

SEQ ID NO: 7348 - RNA, 20 nt, synthetic construct
  source 1..20: mol_type = other RNA
tgctggccaagttttctcca

SEQ ID NO: 7349 - RNA, 20 nt, synthetic construct
  source 1..20: mol_type = other RNA
agctctgggaagccacagtg

SEQ ID NO: 7350 - RNA, 20 nt, synthetic construct
  source 1..20: mol_type = other RNA
gggaagccacagtggttaag

SEQ ID NO: 7351 - RNA, 20 nt, synthetic construct
  source 1..20: mol_type = other RNA
aaatgttccaaagaacaatc

SEQ ID NO: 7352 - RNA, 20 nt, synthetic construct
  source 1..20: mol_type = other RNA
atcactgtagaagcttccag

SEQ ID NO: 7353 - RNA, 20 nt, synthetic construct
  source 1..20: mol_type = other RNA
caatcactgtagaagcttcc

SEQ ID NO: 7354 - RNA, 20 nt, synthetic construct
  source 1..20: mol_type = other RNA
tctcaatcactgtagaagct

SEQ ID NO: 7355 - RNA, 20 nt, synthetic construct
  source 1..20: mol_type = other RNA
gcaggctaatggcagagtca

SEQ ID NO: 7356 - RNA, 20 nt, synthetic construct
  source 1..20: mol_type = other RNA
gccattagcctgcagagtga

SEQ ID NO: 7357 - RNA, 20 nt, synthetic construct
  source 1..20: mol_type = other RNA
tgactctgccattagcctgc

SEQ ID NO: 7358 - RNA, 20 nt, synthetic construct
  source 1..20: mol_type = other RNA
gtttcccgatctgtaaaaag

SEQ ID NO: 7359 - RNA, 20 nt, synthetic construct
  source 1..20: mol_type = other RNA
cagtctcagtttcccgatct

SEQ ID NO: 7360 - RNA, 20 nt, synthetic construct
  source 1..20: mol_type = other RNA
caccctcccagtctcagttt

SEQ ID NO: 7361 - RNA, 20 nt, synthetic construct
  source 1..20: mol_type = other RNA
gggattcaggcagacccatg

SEQ ID NO: 7362 - RNA, 20 nt, synthetic construct
  source 1..20: mol_type = other RNA
tggagtccaggctgtcacca

SEQ ID NO: 7363 - RNA, 20 nt, synthetic construct
  source 1..20: mol_type = other RNA
aagagtgacctcagggattc

SEQ ID NO: 7364 - RNA, 20 nt, synthetic construct
  source 1..20: mol_type = other RNA
ccatccacagaccctcccag

SEQ ID NO: 7365 - RNA, 20 nt, synthetic construct
  source 1..20: mol_type = other RNA
atccacagaccctcccagct

SEQ ID NO: 7366 - RNA, 20 nt, synthetic construct
  source 1..20: mol_type = other RNA
cagctcttagctctttgtct

SEQ ID NO: 7367 - RNA, 20 nt, synthetic construct
  source 1..20: mol_type = other RNA
tagctctttgtcttggttcc

SEQ ID NO: 7368 - RNA, 20 nt, synthetic construct
  source 1..20: mol_type = other RNA
cagaacagcagccgcagaat

SEQ ID NO: 7369 - RNA, 20 nt, synthetic construct
  source 1..20: mol_type = other RNA
aggctttgccttccttggaa

SEQ ID NO: 7370 - RNA, 20 nt, synthetic construct
  source 1..20: mol_type = other RNA
aaaaaaggaaatgacagtct

SEQ ID NO: 7371 - RNA, 20 nt, synthetic construct
  source 1..20: mol_type = other RNA
gaggacgcagctacttctct

SEQ ID NO: 7372 - RNA, 20 nt, synthetic construct
  source 1..20: mol_type = other RNA
gagtttatgctctaaaaaag

SEQ ID NO: 7373 - RNA, 20 nt, synthetic construct
  source 1..20: mol_type = other RNA
ccatgaataggctgtctccc

SEQ ID NO: 7374 - RNA, 20 nt, synthetic construct
  source 1..20: mol_type = other RNA
atgaataggctgtctcccag

SEQ ID NO: 7375 - RNA, 20 nt, synthetic construct
  source 1..20: mol_type = other RNA
caggcacagaattccaggaa

SEQ ID NO: 7376 - RNA, 20 nt, synthetic construct
  source 1..20: mol_type = other RNA
tcccttgaaaccaaccttga

SEQ ID NO: 7377 - RNA, 20 nt, synthetic construct
  source 1..20: mol_type = other RNA
agccaccctgcaagggacac

SEQ ID NO: 7378 - RNA, 20 nt, synthetic construct
  source 1..20: mol_type = other RNA
aagagcctgaaaaatcatct

SEQ ID NO: 7379 - RNA, 20 nt, synthetic construct
  source 1..20: mol_type = other RNA
tggagctggctccagccacc

SEQ ID NO: 7380 - RNA, 20 nt, synthetic construct
  source 1..20: mol_type = other RNA
ggacccaacaggaatcttgg

SEQ ID NO: 7381 - RNA, 20 nt, synthetic construct
  source 1..20: mol_type = other RNA
gttctgtgatcttggttatt

SEQ ID NO: 7382 - RNA, 20 nt, synthetic construct
  source 1..20: mol_type = other RNA
gagcctcagtttcctcaatc

SEQ ID NO: 7383 - RNA, 20 nt, synthetic construct
  source 1..20: mol_type = other RNA
gagaaattcaaataaccaag

SEQ ID NO: 7384 - RNA, 20 nt, synthetic construct
  source 1..20: mol_type = other RNA
gtttcctcaatccttaggtg

SEQ ID NO: 7385 - RNA, 20 nt, synthetic construct
  source 1..20: mol_type = other RNA
atccttaggtggaaataaaa

SEQ ID NO: 7386 - RNA, 20 nt, synthetic construct
  source 1..20: mol_type = other RNA
taccttaaggtctgctgatt

SEQ ID NO: 7387 - RNA, 20 nt, synthetic construct
  source 1..20: mol_type = other RNA
catgattaggttagacccac

SEQ ID NO: 7388 - RNA, 20 nt, synthetic construct
  source 1..20: mol_type = other RNA
tgtgctgtgcaatcttggcc

SEQ ID NO: 7389 - RNA, 20 nt, synthetic construct
  source 1..20: mol_type = other RNA
gcctgtcactcatgtgctgt

SEQ ID NO: 7390 - RNA, 20 nt, synthetic construct
  source 1..20: mol_type = other RNA
ttctttacatactacttttg

SEQ ID NO: 7391 - RNA, 20 nt, synthetic construct
  source 1..20: mol_type = other RNA
aaaaagttttattggaacac

SEQ ID NO: 7392 - RNA, 20 nt, synthetic construct
  source 1..20: mol_type = other RNA
ctttccttttctgggcctat

SEQ ID NO: 7393 - RNA, 20 nt, synthetic construct
  source 1..20: mol_type = other RNA
aacagcttctagtagcaacc

SEQ ID NO: 7394 - RNA, 20 nt, synthetic construct
  source 1..20: mol_type = other RNA
agcgggtagggaagggagct

SEQ ID NO: 7395 - RNA, 20 nt, synthetic construct
  source 1..20: mol_type = other RNA
gaagaaaactggccatcagc

SEQ ID NO: 7396 - RNA, 20 nt, synthetic construct
  source 1..20: mol_type = other RNA
gctgggcgactcagaagaaa

SEQ ID NO: 7397 - RNA, 20 nt, synthetic construct
  source 1..20: mol_type = other RNA
gaatttccctggctcggctg

SEQ ID NO: 7398 - RNA, 20 nt, synthetic construct
  source 1..20: mol_type = other RNA
ggacccagccggatgcagta

SEQ ID NO: 7399 - RNA, 20 nt, synthetic construct
  source 1..20: mol_type = other RNA
ggaggtccccataaactagg

SEQ ID NO: 7400 - RNA, 20 nt, synthetic construct
  source 1..20: mol_type = other RNA
tgagtgcagggaccaggtgt

SEQ ID NO: 7401 - RNA, 20 nt, synthetic construct
  source 1..20: mol_type = other RNA
cctagtttatggggacctcc

SEQ ID NO: 7402 - RNA, 20 nt, synthetic construct
  source 1..20: mol_type = other RNA
atttgtgaatctcccctagt

SEQ ID NO: 7403 - RNA, 20 nt, synthetic construct
  source 1..20: mol_type = other RNA
ggccctggaactggacaagt

SEQ ID NO: 7404 - RNA, 20 nt, synthetic construct
  source 1..20: mol_type = other RNA
ggccctgcttcaacctgaat

SEQ ID NO: 7405 - RNA, 20 nt, synthetic construct
  source 1..20: mol_type = other RNA
cgatggccctgccccaggtg

SEQ ID NO: 7406 - RNA, 20 nt, synthetic construct
  source 1..20: mol_type = other RNA
ctcctttacgggcactcagc

SEQ ID NO: 7407 - RNA, 20 nt, synthetic construct
  source 1..20: mol_type = other RNA
tttacgggcactcagcccct

SEQ ID NO: 7408 - RNA, 20 nt, synthetic construct
  source 1..20: mol_type = other RNA
gccccttctgtcgtcgacct

SEQ ID NO: 7409 - RNA, 20 nt, synthetic construct
  source 1..20: mol_type = other RNA
gcttcctaagcagctaggat

SEQ ID NO: 7410 - RNA, 20 nt, synthetic construct
  source 1..20: mol_type = other RNA
tgcctcagcttcctaagcag

SEQ ID NO: 7411 - RNA, 20 nt, synthetic construct
  source 1..20: mol_type = other RNA
ggaggcagagggtgcaatga

SEQ ID NO: 7412 - RNA, 20 nt, synthetic construct
  source 1..20: mol_type = other RNA
tgagttcaagtgattctcct

SEQ ID NO: 7413 - RNA, 20 nt, synthetic construct
  source 1..20: mol_type = other RNA
gcctcctgagttcaagtgat

SEQ ID NO: 7414 - RNA, 20 nt, synthetic construct
  source 1..20: mol_type = other RNA
ttgcaccctctgcctcctga

SEQ ID NO: 7415 - RNA, 20 nt, synthetic construct
  source 1..20: mol_type = other RNA
gctcattgcaccctctgcct

SEQ ID NO: 7416 - RNA, 20 nt, synthetic construct
  source 1..20: mol_type = other RNA
accccaaccgtcccccagga

SEQ ID NO: 7417 - RNA, 20 nt, synthetic construct
  source 1..20: mol_type = other RNA
ttccatgtggatcccccaca

SEQ ID NO: 7418 - RNA, 20 nt, synthetic construct
  source 1..20: mol_type = other RNA
ctccttccatgtggatcccc

SEQ ID NO: 7419 - RNA, 20 nt, synthetic construct
  source 1..20: mol_type = other RNA
catggggtcggggtcatttt

SEQ ID NO: 7420 - RNA, 20 nt, synthetic construct
  source 1..20: mol_type = other RNA
gactagcccctgcaactgcc

SEQ ID NO: 7421 - RNA, 20 nt, synthetic construct
  source 1..20: mol_type = other RNA
cgggcctcagactagcccct

SEQ ID NO: 7422 - RNA, 20 nt, synthetic construct
  source 1..20: mol_type = other RNA
tcccgggcctcagactagcc

SEQ ID NO: 7423 - RNA, 20 nt, synthetic construct
  source 1..20: mol_type = other RNA
ttcccagcttaactcctccc

SEQ ID NO: 7424 - RNA, 20 nt, synthetic construct
  source 1..20: mol_type = other RNA
tcttgacagcctctcctagc

SEQ ID NO: 7425 - RNA, 20 nt, synthetic construct
  source 1..20: mol_type = other RNA
tgacagcctctcctagctct

SEQ ID NO: 7426 - RNA, 20 nt, synthetic construct
  source 1..20: mol_type = other RNA
cctagctctttgactttggg

SEQ ID NO: 7427 - RNA, 20 nt, synthetic construct
  source 1..20: mol_type = other RNA
tagctctttgactttgggga

SEQ ID NO: 7428 - RNA, 20 nt, synthetic construct
  source 1..20: mol_type = other RNA
ttgactttggggatggggga

SEQ ID NO: 7429 - RNA, 20 nt, synthetic construct
  source 1..20: mol_type = other RNA
ctacatgaaaaggctttgag

SEQ ID NO: 7430 - RNA, 20 nt, synthetic construct
  source 1..20: mol_type = other RNA
aagccttttcatgtagggag

SEQ ID NO: 7431 - RNA, 20 nt, synthetic construct
  source 1..20: mol_type = other RNA
agctcaaagccttttcatgt

SEQ ID NO: 7432 - RNA, 20 nt, synthetic construct
  source 1..20: mol_type = other RNA
tgtctccagctcaaagcctt

SEQ ID NO: 7433 - RNA, 20 nt, synthetic construct
  source 1..20: mol_type = other RNA
tcctgtgaatctgtccaggg

SEQ ID NO: 7434 - RNA, 20 nt, synthetic construct
  source 1..20: mol_type = other RNA
gacctaggtttccgcctcct

SEQ ID NO: 7435 - RNA, 20 nt, synthetic construct
  source 1..20: mol_type = other RNA
tacatctgtgtgatccgggg

SEQ ID NO: 7436 - RNA, 20 nt, synthetic construct
  source 1..20: mol_type = other RNA
gtgtccagatgtgtgacggg

SEQ ID NO: 7437 - RNA, 20 nt, synthetic construct
  source 1..20: mol_type = other RNA
cgtcacacatctggacacag

SEQ ID NO: 7438 - RNA, 20 nt, synthetic construct
  source 1..20: mol_type = other RNA
accctccgctattgcatgac

SEQ ID NO: 7439 - RNA, 20 nt, synthetic construct
  source 1..20: mol_type = other RNA
gctattgcatgacagtcagc

SEQ ID NO: 7440 - RNA, 20 nt, synthetic construct
  source 1..20: mol_type = other RNA
gcttcgcttggtggagcgaa

SEQ ID NO: 7441 - RNA, 20 nt, synthetic construct
  source 1..20: mol_type = other RNA
accaagcgaagcagagcgtc

SEQ ID NO: 7442 - RNA, 20 nt, synthetic construct
  source 1..20: mol_type = other RNA
gtgggtggggccagctggcc

SEQ ID NO: 7443 - RNA, 20 nt, synthetic construct
  source 1..20: mol_type = other RNA
ggcaccggatactccgtggg

SEQ ID NO: 7444 - RNA, 20 nt, synthetic construct
  source 1..20: mol_type = other RNA
ggtccgtcagcttcgtctgc

SEQ ID NO: 7445 - RNA, 20 nt, synthetic construct
  source 1..20: mol_type = other RNA
ttggcctgctgtggtccgtc

SEQ ID NO: 7446 - RNA, 20 nt, synthetic construct
  source 1..20: mol_type = other RNA
atgggacccctatcacctct

SEQ ID NO: 7447 - RNA, 20 nt, synthetic construct
  source 1..20: mol_type = other RNA
ccagagacctgtactacctc

SEQ ID NO: 7448 - RNA, 20 nt, synthetic construct
  source 1..20: mol_type = other RNA
agagacctgtactacctcac

SEQ ID NO: 7449 - RNA, 20 nt, synthetic construct
  source 1..20: mol_type = other RNA
ggagaggtgataggggtccc

SEQ ID NO: 7450 - RNA, 20 nt, synthetic construct
  source 1..20: mol_type = other RNA
ctgtggagtcctcagagaag

SEQ ID NO: 7451 - RNA, 20 nt, synthetic construct
  source 1..20: mol_type = other RNA
acagtgaggtagtacaggtc

SEQ ID NO: 7452 - RNA, 20 nt, synthetic construct
  source 1..20: mol_type = other RNA
gagaaggagagctgcaggtc

SEQ ID NO: 7453 - RNA, 20 nt, synthetic construct
  source 1..20: mol_type = other RNA
gaggactccacagtgaggta

SEQ ID NO: 7454 - RNA, 20 nt, synthetic construct
  source 1..20: mol_type = other RNA
ttctctgaggactccacagt

SEQ ID NO: 7455 - RNA, 20 nt, synthetic construct
  source 1..20: mol_type = other RNA
ccttctctgaggactccaca

SEQ ID NO: 7456 - RNA, 20 nt, synthetic construct
  source 1..20: mol_type = other RNA
cacagcactacctactccgg

SEQ ID NO: 7457 - RNA, 20 nt, synthetic construct
  source 1..20: mol_type = other RNA
cacacagcactacctactcc

SEQ ID NO: 7458 - RNA, 20 nt, synthetic construct
  source 1..20: mol_type = other RNA
ctcacacagcactacctact

SEQ ID NO: 7459 - RNA, 20 nt, synthetic construct
  source 1..20: mol_type = other RNA
atgtctttaaaagccatgcc

SEQ ID NO: 7460 - RNA, 20 nt, synthetic construct
  source 1..20: mol_type = other RNA
aggaagccttcctgggtttc

SEQ ID NO: 7461 - RNA, 20 nt, synthetic construct
  source 1..20: mol_type = other RNA
tccaggaagccttcctgggt

SEQ ID NO: 7462 - RNA, 20 nt, synthetic construct
  source 1..20: mol_type = other RNA
gctgccacctcctccaggaa

SEQ ID NO: 7463 - RNA, 20 nt, synthetic construct
  source 1..20: mol_type = other RNA
gcttggtatgggacagaata

SEQ ID NO: 7464 - RNA, 20 nt, synthetic construct
  source 1..20: mol_type = other RNA
tttgaaatgaaaaggactaa

SEQ ID NO: 7465 - RNA, 20 nt, synthetic construct
  source 1..20: mol_type = other RNA
cacccagccaggcgtgagtg

SEQ ID NO: 7466 - RNA, 20 nt, synthetic construct
  source 1..20: mol_type = other RNA
cgcctggctgggtgggagga

SEQ ID NO: 7467 - RNA, 20 nt, synthetic construct
  source 1..20: mol_type = other RNA
gctattcctgctcccaggca

SEQ ID NO: 7468 - RNA, 20 nt, synthetic construct
  source 1..20: mol_type = other RNA
caggcacctcagtctctggt

SEQ ID NO: 7469 - RNA, 20 nt, synthetic construct
  source 1..20: mol_type = other RNA
gtctctggtggtgcccgctg

SEQ ID NO: 7470 - RNA, 20 nt, synthetic construct
  source 1..20: mol_type = other RNA
ggtggtgcccgctgtgggta

SEQ ID NO: 7471 - RNA, 20 nt, synthetic construct
  source 1..20: mol_type = other RNA
aggtcagaaataaagccttc

SEQ ID NO: 7472 - RNA, 20 nt, synthetic construct
  source 1..20: mol_type = other RNA
gaatagcacccagcatacct

SEQ ID NO: 7473 - RNA, 20 nt, synthetic construct
  source 1..20: mol_type = other RNA
ggaagctcctatcttgagtg

SEQ ID NO: 7474 - RNA, 20 nt, synthetic construct
  source 1..20: mol_type = other RNA
tatcttgagtgtaagtcccc

SEQ ID NO: 7475 - RNA, 20 nt, synthetic construct
  source 1..20: mol_type = other RNA
caccaccttctgtcacctta

SEQ ID NO: 7476 - RNA, 20 nt, synthetic construct
  source 1..20: mol_type = other RNA
aagcaaacttcctgctgtgg

SEQ ID NO: 7477 - RNA, 20 nt, synthetic construct
  source 1..20: mol_type = other RNA
ccggcacctgtgccctgccc

SEQ ID NO: 7478 - RNA, 20 nt, synthetic construct
  source 1..20: mol_type = other RNA
ttttacggatgaggagaaag

SEQ ID NO: 7479 - RNA, 20 nt, synthetic construct
  source 1..20: mol_type = other RNA
tccgtaaaatgaggataata

SEQ ID NO: 7480 - RNA, 20 nt, synthetic construct
  source 1..20: mol_type = other RNA
tcatccgtaaaatgaggata

SEQ ID NO: 7481 - RNA, 20 nt, synthetic construct
  source 1..20: mol_type = other RNA
ttctcctcatccgtaaaatg

SEQ ID NO: 7482 - RNA, 20 nt, synthetic construct
  source 1..20: mol_type = other RNA
gaacctctttctcctcatcc

SEQ ID NO: 7483 - RNA, 20 nt, synthetic construct
  source 1..20: mol_type = other RNA
tggaaggaggcaagttgggt

SEQ ID NO: 7484 - RNA, 20 nt, synthetic construct
  source 1..20: mol_type = other RNA
gtcctgccctcatctgcaag

SEQ ID NO: 7485 - RNA, 20 nt, synthetic construct
  source 1..20: mol_type = other RNA
tctgcaaggatgctgggagc

SEQ ID NO: 7486 - RNA, 20 nt, synthetic construct
  source 1..20: mol_type = other RNA
cagcatccttgcagatgagg

SEQ ID NO: 7487 - RNA, 20 nt, synthetic construct
  source 1..20: mol_type = other RNA
gaggagggtgaggacaggca

SEQ ID NO: 7488 - RNA, 20 nt, synthetic construct
  source 1..20: mol_type = other RNA
gagctcccagcatccttgca

SEQ ID NO: 7489 - RNA, 20 nt, synthetic construct
  source 1..20: mol_type = other RNA
tctgagctcccagcatcctt

SEQ ID NO: 7490 - RNA, 20 nt, synthetic construct
  source 1..20: mol_type = other RNA
ccctcctctgagctcccagc

SEQ ID NO: 7491 - RNA, 20 nt, synthetic construct
  source 1..20: mol_type = other RNA
gcttcctcggctgtcttcca

SEQ ID NO: 7492 - RNA, 20 nt, synthetic construct
  source 1..20: mol_type = other RNA
gtcaccctggtctgtgattg

SEQ ID NO: 7493 - RNA, 20 nt, synthetic construct
  source 1..20: mol_type = other RNA
caatcacagaccagggtgac

SEQ ID NO: 7494 - RNA, 20 nt, synthetic construct
  source 1..20: mol_type = other RNA
ctgctcccaatcacagacca

SEQ ID NO: 7495 - RNA, 20 nt, synthetic construct
  source 1..20: mol_type = other RNA
cagcaggctgctgtgaggct

SEQ ID NO: 7496 - RNA, 20 nt, synthetic construct
  source 1..20: mol_type = other RNA
ccatccctggaggtatgcaa

SEQ ID NO: 7497 - RNA, 20 nt, synthetic construct
  source 1..20: mol_type = other RNA
atccctggaggtatgcaagt

SEQ ID NO: 7498 - RNA, 20 nt, synthetic construct
  source 1..20: mol_type = other RNA
agggatggagagcttacaac

SEQ ID NO: 7499 - RNA, 20 nt, synthetic construct
  source 1..20: mol_type = other RNA
acttgcatacctccagggat

SEQ ID NO: 7500 - RNA, 20 nt, synthetic construct
  source 1..20: mol_type = other RNA
taagtggggatgtcaaccac

SEQ ID NO: 7501 - RNA, 20 nt, synthetic construct
  source 1..20: mol_type = other RNA
cggcttcctcgtaagtgggg

SEQ ID NO: 7502 - RNA, 20 nt, synthetic construct
  source 1..20: mol_type = other RNA
gccactgggaagctcacggc

SEQ ID NO: 7503 - RNA, 20 nt, synthetic construct
  source 1..20: mol_type = other RNA
gtagggtatgcaggtggtgt

SEQ ID NO: 7504 - RNA, 20 nt, synthetic construct
  source 1..20: mol_type = other RNA
agggcttcctccgtagggta

SEQ ID NO: 7505 - RNA, 20 nt, synthetic construct
  source 1..20: mol_type = other RNA
atccacttggctccagggct

SEQ ID NO: 7506 - RNA, 20 nt, synthetic construct
  source 1..20: mol_type = other RNA
gcacccagcccgcctggcct

SEQ ID NO: 7507 - RNA, 20 nt, synthetic construct
  source 1..20: mol_type = other RNA
acccagctatgagagcatca

SEQ ID NO: 7508 - RNA, 20 nt, synthetic construct
  source 1..20: mol_type = other RNA
tagctgggtggaggccaggc

SEQ ID NO: 7509 - RNA, 20 nt, synthetic construct
  source 1..20: mol_type = other RNA
catagctgggtggaggccag

SEQ ID NO: 7510 - RNA, 20 nt, synthetic construct
  source 1..20: mol_type = other RNA
tgatgccgtttctgcggaga

SEQ ID NO: 7511 - RNA, 20 nt, synthetic construct
  source 1..20: mol_type = other RNA
gcagaaacggcatcaagagc

SEQ ID NO: 7512 - RNA, 20 nt, synthetic construct
  source 1..20: mol_type = other RNA
ctgtgtcacccaggctggag

SEQ ID NO: 7513 - RNA, 20 nt, synthetic construct
  source 1..20: mol_type = other RNA
agcctgggtgacacagtgag

SEQ ID NO: 7514 - RNA, 20 nt, synthetic construct
  source 1..20: mol_type = other RNA
atcatgactcgctgcagcct

SEQ ID NO: 7515 - RNA, 20 nt, synthetic construct
  source 1..20: mol_type = other RNA
ctgcagcctcttcctcccag

SEQ ID NO: 7516 - RNA, 20 nt, synthetic construct
  source 1..20: mol_type = other RNA
tcctcccaggctcaagagat

SEQ ID NO: 7517 - RNA, 20 nt, synthetic construct
  source 1..20: mol_type = other RNA
caggctcaagagatcctccc

SEQ ID NO: 7518 - RNA, 20 nt, synthetic construct
  source 1..20: mol_type = other RNA
agagatcctcccacctcagc

SEQ ID NO: 7519 - RNA, 20 nt, synthetic construct
  source 1..20: mol_type = other RNA
tgagcctgggaggaagaggc

SEQ ID NO: 7520 - RNA, 20 nt, synthetic construct
  source 1..20: mol_type = other RNA
cacctcagcctcccaagtag

SEQ ID NO: 7521 - RNA, 20 nt, synthetic construct
  source 1..20: mol_type = other RNA
gcctcccaagtagcagaaac

SEQ ID NO: 7522 - RNA, 20 nt, synthetic construct
  source 1..20: mol_type = other RNA
caagtagcagaaaccacaag

SEQ ID NO: 7523 - RNA, 20 nt, synthetic construct
  source 1..20: mol_type = other RNA
ctctgccttagcctcctcat

SEQ ID NO: 7524 - RNA, 20 nt, synthetic construct
  source 1..20: mol_type = other RNA
ctgccttagcctcctcatct

SEQ ID NO: 7525 - RNA, 20 nt, synthetic construct
  source 1..20: mol_type = other RNA
gccttagcctcctcatctgt

SEQ ID NO: 7526 - RNA, 20 nt, synthetic construct
  source 1..20: mol_type = other RNA
tcatctgtaaaatgggaatt

SEQ ID NO: 7527 - RNA, 20 nt, synthetic construct
  source 1..20: mol_type = other RNA
tctgtaaaatgggaattgag

SEQ ID NO: 7528 - RNA, 20 nt, synthetic construct
  source 1..20: mol_type = other RNA
attcccattttacagatgag

SEQ ID NO: 7529 - RNA, 20 nt, synthetic construct
  source 1..20: mol_type = other RNA
aagagctgatttgtgaggat

SEQ ID NO: 7530 - RNA, 20 nt, synthetic construct
  source 1..20: mol_type = other RNA
ttgagggaatcctcaattcc

SEQ ID NO: 7531 - RNA, 20 nt, synthetic construct
  source 1..20: mol_type = other RNA
caaatcagctctttgaggga

SEQ ID NO: 7532 - RNA, 20 nt, synthetic construct
  source 1..20: mol_type = other RNA
ccctccccccaccccccact

SEQ ID NO: 7533 - RNA, 20 nt, synthetic construct
  source 1..20: mol_type = other RNA
ccccaccccccactgtggct

SEQ ID NO: 7534 - RNA, 20 nt, synthetic construct
  source 1..20: mol_type = other RNA
cagctcactttcaataatga

SEQ ID NO: 7535 - RNA, 20 nt, synthetic construct
  source 1..20: mol_type = other RNA
ctttcaataatgaaagccca

SEQ ID NO: 7536 - RNA, 20 nt, synthetic construct
  source 1..20: mol_type = other RNA
aggctcctagactgtcctgg

SEQ ID NO: 7537 - RNA, 20 nt, synthetic construct
  source 1..20: mol_type = other RNA
cccaaggtcacttcacacct

SEQ ID NO: 7538 - RNA, 20 nt, synthetic construct
  source 1..20: mol_type = other RNA
cctaactcacccaaggtcac

SEQ ID NO: 7539 - RNA, 20 nt, synthetic construct
  source 1..20: mol_type = other RNA
ttaactcacctaactcaccc

SEQ ID NO: 7540 - RNA, 20 nt, synthetic construct
  source 1..20: mol_type = other RNA
tggtcacaccagcaactcat

SEQ ID NO: 7541 - RNA, 20 nt, synthetic construct
  source 1..20: mol_type = other RNA
tgtgggcttccagttaggcc

SEQ ID NO: 7542 - RNA, 20 nt, synthetic construct
  source 1..20: mol_type = other RNA
aggtcaccagcatcatgaaa

SEQ ID NO: 7543 - RNA, 20 nt, synthetic construct
  source 1..20: mol_type = other RNA
ttcatgatgctggtgacctt

SEQ ID NO: 7544 - RNA, 20 nt, synthetic construct
  source 1..20: mol_type = other RNA
gcctctttcatgatgctggt

SEQ ID NO: 7545 - RNA, 20 nt, synthetic construct
  source 1..20: mol_type = other RNA
gcagccctgactcagcctct

SEQ ID NO: 7546 - RNA, 20 nt, synthetic construct
  source 1..20: mol_type = other RNA
cttaccttcttcaggacttt

SEQ ID NO: 7547 - RNA, 20 nt, synthetic construct
  source 1..20: mol_type = other RNA
ctcccttaccttcttcagga

SEQ ID NO: 7548 - RNA, 20 nt, synthetic construct
  source 1..20: mol_type = other RNA
aggcagaaggaacagcaggt

SEQ ID NO: 7549 - RNA, 20 nt, synthetic construct
  source 1..20: mol_type = other RNA
gcacctgctgttccttctgc

SEQ ID NO: 7550 - RNA, 20 nt, synthetic construct
  source 1..20: mol_type = other RNA
tccatcacacccacatccta

SEQ ID NO: 7551 - RNA, 20 nt, synthetic construct
  source 1..20: mol_type = other RNA
cctcctccatcacacccaca

SEQ ID NO: 7552 - RNA, 20 nt, synthetic construct
  source 1..20: mol_type = other RNA
cataaccccatccttccggt

SEQ ID NO: 7553 - RNA, 20 nt, synthetic construct
  source 1..20: mol_type = other RNA
ccaggcctgcccctcccata

SEQ ID NO: 7554 - RNA, 20 nt, synthetic construct
  source 1..20: mol_type = other RNA
gtgcctttgcacatgctggc

SEQ ID NO: 7555 - RNA, 20 nt, synthetic construct
  source 1..20: mol_type = other RNA
gtgcctaggaggtttctcct

SEQ ID NO: 7556 - RNA, 20 nt, synthetic construct
  source 1..20: mol_type = other RNA
taggcacagaggccagcatg

SEQ ID NO: 7557 - RNA, 20 nt, synthetic construct
  source 1..20: mol_type = other RNA
tgccccgtcagaactccaac

SEQ ID NO: 7558 - RNA, 20 nt, synthetic construct
  source 1..20: mol_type = other RNA
atgcttacctctgtcaaatg

SEQ ID NO: 7559 - RNA, 20 nt, synthetic construct
  source 1..20: mol_type = other RNA
gtcaaatgggcgtgctcttt

SEQ ID NO: 7560 - RNA, 20 nt, synthetic construct
  source 1..20: mol_type = other RNA
ttccctccctgcctcggggt

SEQ ID NO: 7561 - RNA, 20 nt, synthetic construct
  source 1..20: mol_type = other RNA
ctgcctcggggtgtcatggg

SEQ ID NO: 7562 - RNA, 20 nt, synthetic construct
  source 1..20: mol_type = other RNA
gggtgtcatgggagcccgct

SEQ ID NO: 7563 - RNA, 20 nt, synthetic construct
  source 1..20: mol_type = other RNA
catgacaccccgaggcaggg

SEQ ID NO: 7564 - RNA, 20 nt, synthetic construct
  source 1..20: mol_type = other RNA
caaggatcccgaaagctggg

SEQ ID NO: 7565 - RNA, 20 nt, synthetic construct
  source 1..20: mol_type = other RNA
gctggacgatgaaagactcc

SEQ ID NO: 7566 - RNA, 20 nt, synthetic construct
  source 1..20: mol_type = other RNA
gcgcgctctgctccccagtc

SEQ ID NO: 7567 - RNA, 20 nt, synthetic construct
  source 1..20: mol_type = other RNA
gctccccagtcccccaggtg

SEQ ID NO: 7568 - RNA, 20 nt, synthetic construct
  source 1..20: mol_type = other RNA
ccagtcccccaggtggcccg

SEQ ID NO: 7569 - RNA, 20 nt, synthetic construct
  source 1..20: mol_type = other RNA
gcaggctcggtttcctcgcc

SEQ ID NO: 7570 - RNA, 20 nt, synthetic construct
  source 1..20: mol_type = other RNA
gtttcctcgcctgtgaaatg

SEQ ID NO: 7571 - RNA, 20 nt, synthetic construct
  source 1..20: mol_type = other RNA
cctgtgaaatgcgggcgatg

SEQ ID NO: 7572 - RNA, 20 nt, synthetic construct
  source 1..20: mol_type = other RNA
cctccccgccgcgactgctc

SEQ ID NO: 7573 - RNA, 20 nt, synthetic construct
  source 1..20: mol_type = other RNA
ccgccgcgactgctcatcac

SEQ ID NO: 7574 - RNA, 20 nt, synthetic construct
  source 1..20: mol_type = other RNA
gcgccgggcggcccacgagg

SEQ ID NO: 7575 - RNA, 20 nt, synthetic construct
  source 1..20: mol_type = other RNA
tgggccgcccggcgctgagc

SEQ ID NO: 7576 - RNA, 20 nt, synthetic construct
  source 1..20: mol_type = other RNA
atccccttcacattcacacg

SEQ ID NO: 7577 - RNA, 20 nt, synthetic construct
  source 1..20: mol_type = other RNA
ttgggttcctccatcccctt

SEQ ID NO: 7578 - RNA, 20 nt, synthetic construct
  source 1..20: mol_type = other RNA
aggcctggcctccttgggtt

SEQ ID NO: 7579 - RNA, 20 nt, synthetic construct
  source 1..20: mol_type = other RNA
cagatttggtgctgtctcca

SEQ ID NO: 7580 - RNA, 20 nt, synthetic construct
  source 1..20: mol_type = other RNA
gtaaaatgggaataataatg

SEQ ID NO: 7581 - RNA, 20 nt, synthetic construct
  source 1..20: mol_type = other RNA
tctgtaaaatgggaataata

SEQ ID NO: 7582 - RNA, 20 nt, synthetic construct
  source 1..20: mol_type = other RNA
gtttcctcctctgtaaaatg

SEQ ID NO: 7583 - RNA, 20 nt, synthetic construct
  source 1..20: mol_type = other RNA
cagctgcagaactgtaccct

SEQ ID NO: 7584 - RNA, 20 nt, synthetic construct
  source 1..20: mol_type = other RNA
gctgcagaactgtaccctgt

SEQ ID NO: 7585 - RNA, 20 nt, synthetic construct
  source 1..20: mol_type = other RNA
agaaaacagggtacagttct

SEQ ID NO: 7586 - RNA, 20 nt, synthetic construct
  source 1..20: mol_type = other RNA
caccttccagctctagaaaa

SEQ ID NO: 7587 - RNA, 20 nt, synthetic construct
  source 1..20: mol_type = other RNA
accccacagtaggcaaatga

SEQ ID NO: 7588 - RNA, 20 nt, synthetic construct
  source 1..20: mol_type = other RNA
tttgcctactgtggggttga

SEQ ID NO: 7589 - RNA, 20 nt, synthetic construct
  source 1..20: mol_type = other RNA
cactctccctcccctgtgtg

SEQ ID NO: 7590 - RNA, 20 nt, synthetic construct
  source 1..20: mol_type = other RNA
ctcagattcacacacacact

SEQ ID NO: 7591 - RNA, 20 nt, synthetic construct
  source 1..20: mol_type = other RNA
gattcacacacacactccag

SEQ ID NO: 7592 - RNA, 20 nt, synthetic construct
  source 1..20: mol_type = other RNA
aggccagccgggcccagagg

SEQ ID NO: 7593 - RNA, 20 nt, synthetic construct
  source 1..20: mol_type = other RNA
gggcccggctggcctggagt

SEQ ID NO: 7594 - RNA, 20 nt, synthetic construct
  source 1..20: mol_type = other RNA
ccttccctctgggcccggct

SEQ ID NO: 7595 - RNA, 20 nt, synthetic construct
  source 1..20: mol_type = other RNA
caccttccctctgggcccgg

SEQ ID NO: 7596 - RNA, 20 nt, synthetic construct
  source 1..20: mol_type = other RNA
ttgccctctcaccttccctc

SEQ ID NO: 7597 - RNA, 20 nt, synthetic construct
  source 1..20: mol_type = other RNA
cttcaacggacccacaccca

SEQ ID NO: 7598 - RNA, 20 nt, synthetic construct
  source 1..20: mol_type = other RNA
agccctgttgaactggtggg

SEQ ID NO: 7599 - RNA, 20 nt, synthetic construct
  source 1..20: mol_type = other RNA
tcagccatggctgcctggcc

SEQ ID NO: 7600 - RNA, 20 nt, synthetic construct
  source 1..20: mol_type = other RNA
gtacgttcctcatgagccat

SEQ ID NO: 7601 - RNA, 20 nt, synthetic construct
  source 1..20: mol_type = other RNA
tgagccatgatcggccccag

SEQ ID NO: 7602 - RNA, 20 nt, synthetic construct
  source 1..20: mol_type = other RNA
tgaggaacgtaccgagggcc

SEQ ID NO: 7603 - RNA, 20 nt, synthetic construct
  source 1..20: mol_type = other RNA
agatgatgcccccgatcacc

SEQ ID NO: 7604 - RNA, 20 nt, synthetic construct
  source 1..20: mol_type = other RNA
tcccatcactaaattacaca

SEQ ID NO: 7605 - RNA, 20 nt, synthetic construct
  source 1..20: mol_type = other RNA
caaaccagtgctcttcccat

SEQ ID NO: 7606 - RNA, 20 nt, synthetic construct
  source 1..20: mol_type = other RNA
ggactcccaaaccagtgctc

SEQ ID NO: 7607 - RNA, 20 nt, synthetic construct
  source 1..20: mol_type = other RNA
ctatgacctttgtctttctg

SEQ ID NO: 7608 - RNA, 20 nt, synthetic construct
  source 1..20: mol_type = other RNA
atgacctttgtctttctgag

SEQ ID NO: 7609 - RNA, 20 nt, synthetic construct
  source 1..20: mol_type = other RNA
tggcatttccattccacaga

SEQ ID NO: 7610 - RNA, 20 nt, synthetic construct
  source 1..20: mol_type = other RNA
aggcattgaagattcgcaac

SEQ ID NO: 7611 - RNA, 20 nt, synthetic construct
  source 1..20: mol_type = other RNA
ctaggcattgaagattcgca

SEQ ID NO: 7612 - RNA, 20 nt, synthetic construct
  source 1..20: mol_type = other RNA
ctgggtctgtacctgaccag

SEQ ID NO: 7613 - RNA, 20 nt, synthetic construct
  source 1..20: mol_type = other RNA
ttttctccctgggtctgtac

SEQ ID NO: 7614 - RNA, 20 nt, synthetic construct
  source 1..20: mol_type = other RNA
ccagccctgccccctccacg

SEQ ID NO: 7615 - RNA, 20 nt, synthetic construct
  source 1..20: mol_type = other RNA
acgggccaaccctgggctgt

SEQ ID NO: 7616 - RNA, 20 nt, synthetic construct
  source 1..20: mol_type = other RNA
agcactgaacagaatgacag

SEQ ID NO: 7617 - RNA, 20 nt, synthetic construct
  source 1..20: mol_type = other RNA
gtctgtgcaattccttgagc

SEQ ID NO: 7618 - RNA, 20 nt, synthetic construct
  source 1..20: mol_type = other RNA
aggaattgcacagacagagg

SEQ ID NO: 7619 - RNA, 20 nt, synthetic construct
  source 1..20: mol_type = other RNA
gctcaaggaattgcacagac

SEQ ID NO: 7620 - RNA, 20 nt, synthetic construct
  source 1..20: mol_type = other RNA
cagtgacctctgctcaagga

SEQ ID NO: 7621 - RNA, 20 nt, synthetic construct
  source 1..20: mol_type = other RNA
tgtcaccactgctattataa

SEQ ID NO: 7622 - RNA, 20 nt, synthetic construct
  source 1..20: mol_type = other RNA
cctctaccgtcactcccatc

SEQ ID NO: 7623 - RNA, 20 nt, synthetic construct
  source 1..20: mol_type = other RNA
cctcccctctaccgtcactc

SEQ ID NO: 7624 - RNA, 20 nt, synthetic construct
  source 1..20: mol_type = other RNA
cctcccctcccctctaccgt

SEQ ID NO: 7625 - RNA, 20 nt, synthetic construct
  source 1..20: mol_type = other RNA
tcccctcccctcccctctac

SEQ ID NO: 7626 - RNA, 20 nt, synthetic construct
  source 1..20: mol_type = other RNA
ttaatacccagcaatattcc

SEQ ID NO: 7627 - RNA, 20 nt, synthetic construct
  source 1..20: mol_type = other RNA
acagcacgtgaacccatgaa

SEQ ID NO: 7628 - RNA, 20 nt, synthetic construct
  source 1..20: mol_type = other RNA
ttcatgtcccacttctgtga

SEQ ID NO: 7629 - RNA, 20 nt, synthetic construct
  source 1..20: mol_type = other RNA
ttctgccaaggtcacagaag

SEQ ID NO: 7630 - RNA, 20 nt, synthetic construct
  source 1..20: mol_type = other RNA
ccctcagctctgagccttgt

SEQ ID NO: 7631 - RNA, 20 nt, synthetic construct
  source 1..20: mol_type = other RNA
gctctgagccttgtacggct

SEQ ID NO: 7632 - RNA, 20 nt, synthetic construct
  source 1..20: mol_type = other RNA
gagccttgtacggctgattg

SEQ ID NO: 7633 - RNA, 20 nt, synthetic construct
  source 1..20: mol_type = other RNA
gagctgagggggagggactc

SEQ ID NO: 7634 - RNA, 20 nt, synthetic construct
  source 1..20: mol_type = other RNA
gtgaagcctgtttcctcccc

SEQ ID NO: 7635 - RNA, 20 nt, synthetic construct
  source 1..20: mol_type = other RNA
ccttctctgtgaagcctgtt

SEQ ID NO: 7636 - RNA, 20 nt, synthetic construct
  source 1..20: mol_type = other RNA
cctacaaagcccagctcacc

SEQ ID NO: 7637 - RNA, 20 nt, synthetic construct
  source 1..20: mol_type = other RNA
tatctcacctacaaagccca

SEQ ID NO: 7638 - RNA, 20 nt, synthetic construct
  source 1..20: mol_type = other RNA
gcttggtgaactcttatctc

SEQ ID NO: 7639 - RNA, 20 nt, synthetic construct
  source 1..20: mol_type = other RNA
ccactggtatggctgccccc

SEQ ID NO: 7640 - RNA, 20 nt, synthetic construct
  source 1..20: mol_type = other RNA
ggtcttggtgagagctgaca

SEQ ID NO: 7641 - RNA, 20 nt, synthetic construct
  source 1..20: mol_type = other RNA
ccaagaccagagaagaagcc

SEQ ID NO: 7642 - RNA, 20 nt, synthetic construct
  source 1..20: mol_type = other RNA
caccaagaccagagaagaag

SEQ ID NO: 7643 - RNA, 20 nt, synthetic construct
  source 1..20: mol_type = other RNA
gggaattggcaaacctctcc

SEQ ID NO: 7644 - RNA, 20 nt, synthetic construct
  source 1..20: mol_type = other RNA
gtgcagttgaccagggtagg

SEQ ID NO: 7645 - RNA, 20 nt, synthetic construct
  source 1..20: mol_type = other RNA
cctttgcttgcagatcacct

SEQ ID NO: 7646 - RNA, 20 nt, synthetic construct
  source 1..20: mol_type = other RNA
tttgcttgcagatcaccttc

SEQ ID NO: 7647 - RNA, 20 nt, synthetic construct
  source 1..20: mol_type = other RNA
gactttcaaggcatcctctc

SEQ ID NO: 7648 - RNA, 20 nt, synthetic construct
  source 1..20: mol_type = other RNA
ccccaaaggccatgggcctg

SEQ ID NO: 7649 - RNA, 20 nt, synthetic construct
  source 1..20: mol_type = other RNA
ccaaaggccatgggcctgct

SEQ ID NO: 7650 - RNA, 20 nt, synthetic construct
  source 1..20: mol_type = other RNA
agcaggcccatggcctttgg

SEQ ID NO: 7651 - RNA, 20 nt, synthetic construct
  source 1..20: mol_type = other RNA
gcagcaagcccattctccag

SEQ ID NO: 7652 - RNA, 20 nt, synthetic construct
  source 1..20: mol_type = other RNA
tcatctcggcagcaagccca

SEQ ID NO: 7653 - RNA, 20 nt, synthetic construct
  source 1..20: mol_type = other RNA
cgggaggggaggagtaagcc

SEQ ID NO: 7654 - RNA, 20 nt, synthetic construct
  source 1..20: mol_type = other RNA
ggaggggaggagtaagcccc

SEQ ID NO: 7655 - RNA, 20 nt, synthetic construct
  source 1..20: mol_type = other RNA
cgagagggcctggcacctac

SEQ ID NO: 7656 - RNA, 20 nt, synthetic construct
  source 1..20: mol_type = other RNA
cctcccgagagggcctggca

SEQ ID NO: 7657 - RNA, 20 nt, synthetic construct
  source 1..20: mol_type = other RNA
tcccctcccgagagggcctg

SEQ ID NO: 7658 - RNA, 20 nt, synthetic construct
  source 1..20: mol_type = other RNA
cctgactgaggagagtgaga

SEQ ID NO: 7659 - RNA, 20 nt, synthetic construct
  source 1..20: mol_type = other RNA
gtcaggggagactggcctat

SEQ ID NO: 7660 - RNA, 20 nt, synthetic construct
  source 1..20: mol_type = other RNA
tcagtcaggggagactggcc

SEQ ID NO: 7661 - RNA, 20 nt, synthetic construct
  source 1..20: mol_type = other RNA
cctcagtcaggggagactgg

SEQ ID NO: 7662 - RNA, 20 nt, synthetic construct
  source 1..20: mol_type = other RNA
ctctcctcagtcaggggaga

SEQ ID NO: 7663 - RNA, 20 nt, synthetic construct
  source 1..20: mol_type = other RNA
cactctcctcagtcagggga

SEQ ID NO: 7664 - RNA, 20 nt, synthetic construct
  source 1..20: mol_type = other RNA
ctctcactctcctcagtcag

SEQ ID NO: 7665 - RNA, 20 nt, synthetic construct
  source 1..20: mol_type = other RNA
cagaattgagagttgaaaac

SEQ ID NO: 7666 - RNA, 20 nt, synthetic construct
  source 1..20: mol_type = other RNA
tctgtacaatgggaataata

SEQ ID NO: 7667 - RNA, 20 nt, synthetic construct
  source 1..20: mol_type = other RNA
gtttcctcatctgtacaatg

SEQ ID NO: 7668 - RNA, 20 nt, synthetic construct
  source 1..20: mol_type = other RNA
tccctgacaagacaaagtcc

SEQ ID NO: 7669 - RNA, 20 nt, synthetic construct
  source 1..20: mol_type = other RNA
atgaaacaaatcatacaatg

SEQ ID NO: 7670 - RNA, 20 nt, synthetic construct
  source 1..20: mol_type = other RNA
ttatacagctaggaagattg

SEQ ID NO: 7671 - RNA, 20 nt, synthetic construct
  source 1..20: mol_type = other RNA
atcttcctagctgtataaag

SEQ ID NO: 7672 - RNA, 20 nt, synthetic construct
  source 1..20: mol_type = other RNA
gagaagtgtagtcactagcc

SEQ ID NO: 7673 - RNA, 20 nt, synthetic construct
  source 1..20: mol_type = other RNA
gagcctcaatcttcctagct

SEQ ID NO: 7674 - RNA, 20 nt, synthetic construct
  source 1..20: mol_type = other RNA
tggggagtcagtgatggaag

SEQ ID NO: 7675 - RNA, 20 nt, synthetic construct
  source 1..20: mol_type = other RNA
ccatgaggtttggggctagt

SEQ ID NO: 7676 - RNA, 20 nt, synthetic construct
  source 1..20: mol_type = other RNA
ctcccactccagccccagtc

SEQ ID NO: 7677 - RNA, 20 nt, synthetic construct
  source 1..20: mol_type = other RNA
cccactccagccccagtccc

SEQ ID NO: 7678 - RNA, 20 nt, synthetic construct
  source 1..20: mol_type = other RNA
cactccagccccagtcccca

SEQ ID NO: 7679 - RNA, 20 nt, synthetic construct
  source 1..20: mol_type = other RNA
agccccagtccccagccgcc

SEQ ID NO: 7680 - RNA, 20 nt, synthetic construct
  source 1..20: mol_type = other RNA
cacagccttacatagggcgg

SEQ ID NO: 7681 - RNA, 20 nt, synthetic construct
  source 1..20: mol_type = other RNA
ggtcataggcggcttcctcc

SEQ ID NO: 7682 - RNA, 20 nt, synthetic construct
  source 1..20: mol_type = other RNA
tgactttcatctggatgtgg

SEQ ID NO: 7683 - RNA, 20 nt, synthetic construct
  source 1..20: mol_type = other RNA
ctgtagctcatgactttcat

SEQ ID NO: 7684 - RNA, 20 nt, synthetic construct
  source 1..20: mol_type = other RNA
ttgctggcccctgagatggg

SEQ ID NO: 7685 - RNA, 20 nt, synthetic construct
  source 1..20: mol_type = other RNA
ggggccagcaaggagcggtg

SEQ ID NO: 7686 - RNA, 20 nt, synthetic construct
  source 1..20: mol_type = other RNA
atcactggttcccagcttcg

SEQ ID NO: 7687 - RNA, 20 nt, synthetic construct
  source 1..20: mol_type = other RNA
tccatcactggttcccagct

SEQ ID NO: 7688 - RNA, 20 nt, synthetic construct
  source 1..20: mol_type = other RNA
atccaggcctgaacgtcgcc

SEQ ID NO: 7689 - RNA, 20 nt, synthetic construct
  source 1..20: mol_type = other RNA
gacgagagtgaaggggaaag

SEQ ID NO: 7690 - RNA, 20 nt, synthetic construct
  source 1..20: mol_type = other RNA
tctgagcccttgtggatgac

SEQ ID NO: 7691 - RNA, 20 nt, synthetic construct
  source 1..20: mol_type = other RNA
cgtctgagcccttgtggatg

SEQ ID NO: 7692 - RNA, 20 nt, synthetic construct
  source 1..20: mol_type = other RNA
gagctggcccgggtgagtgc

SEQ ID NO: 7693 - RNA, 20 nt, synthetic construct
  source 1..20: mol_type = other RNA
gagttaggcgtctttcccct

SEQ ID NO: 7694 - RNA, 20 nt, synthetic construct
  source 1..20: mol_type = other RNA
cccgggccagctctgagtta

SEQ ID NO: 7695 - RNA, 20 nt, synthetic construct
  source 1..20: mol_type = other RNA
aagcactcacccgggccagc

SEQ ID NO: 7696 - RNA, 20 nt, synthetic construct
  source 1..20: mol_type = other RNA
tgccctctaagcactcaccc

SEQ ID NO: 7697 - RNA, 20 nt, synthetic construct
  source 1..20: mol_type = other RNA
ccttacccccagtgtcccca

SEQ ID NO: 7698 - RNA, 20 nt, synthetic construct
  source 1..20: mol_type = other RNA
actgccctctccttaccccc

SEQ ID NO: 7699 - RNA, 20 nt, synthetic construct
  source 1..20: mol_type = other RNA
gggtgtcccacaccctccac

SEQ ID NO: 7700 - RNA, 20 nt, synthetic construct
  source 1..20: mol_type = other RNA
tttgtctgccacatctgcca

SEQ ID NO: 7701 - RNA, 20 nt, synthetic construct
  source 1..20: mol_type = other RNA
caagcccatactcatttgtc

SEQ ID NO: 7702 - RNA, 20 nt, synthetic construct
  source 1..20: mol_type = other RNA
gttcaaaccccagctcctgt

SEQ ID NO: 7703 - RNA, 20 nt, synthetic construct
  source 1..20: mol_type = other RNA
tgtgctgtgtagctgtggta

SEQ ID NO: 7704 - RNA, 20 nt, synthetic construct
  source 1..20: mol_type = other RNA
gtttccccacacagggatga

SEQ ID NO: 7705 - RNA, 20 nt, synthetic construct
  source 1..20: mol_type = other RNA
acattcctgggtagtaggaa

SEQ ID NO: 7706 - RNA, 20 nt, synthetic construct
  source 1..20: mol_type = other RNA
gaatgcttgtcgtgagtagc

SEQ ID NO: 7707 - RNA, 20 nt, synthetic construct
  source 1..20: mol_type = other RNA
cgacaagcattcagagacat

SEQ ID NO: 7708 - RNA, 20 nt, synthetic construct
  source 1..20: mol_type = other RNA
tggccccctgctactcacga

SEQ ID NO: 7709 - RNA, 20 nt, synthetic construct
  source 1..20: mol_type = other RNA
ggctcctggccccctgctac

SEQ ID NO: 7710 - RNA, 20 nt, synthetic construct
  source 1..20: mol_type = other RNA
ggtcctctggctcctggccc

SEQ ID NO: 7711 - RNA, 20 nt, synthetic construct
  source 1..20: mol_type = other RNA
gtgaccttgggcaaggccct

SEQ ID NO: 7712 - RNA, 20 nt, synthetic construct
  source 1..20: mol_type = other RNA
ccactccactcccatccctg

SEQ ID NO: 7713 - RNA, 20 nt, synthetic construct
  source 1..20: mol_type = other RNA
actcccatccctgtctgttt

SEQ ID NO: 7714 - RNA, 20 nt, synthetic construct
  source 1..20: mol_type = other RNA
catccctgtctgtttgtgaa

SEQ ID NO: 7715 - RNA, 20 nt, synthetic construct
  source 1..20: mol_type = other RNA
gttcacaaacagacagggat

SEQ ID NO: 7716 - RNA, 20 nt, synthetic construct
  source 1..20: mol_type = other RNA
ttattcatccatgtacttat

SEQ ID NO: 7717 - RNA, 20 nt, synthetic construct
  source 1..20: mol_type = other RNA
gtaatgtggatggaatgaat

SEQ ID NO: 7718 - RNA, 20 nt, synthetic construct
  source 1..20: mol_type = other RNA
ggggtagattccagtgaagg

SEQ ID NO: 7719 - RNA, 20 nt, synthetic construct
  source 1..20: mol_type = other RNA
tcaggggtagattccagtga

SEQ ID NO: 7720 - RNA, 20 nt, synthetic construct
  source 1..20: mol_type = other RNA
gagtccaatgagggaggcaa

SEQ ID NO: 7721 - RNA, 20 nt, synthetic construct
  source 1..20: mol_type = other RNA
gagctcctcaggggtagatt

SEQ ID NO: 7722 - RNA, 20 nt, synthetic construct
  source 1..20: mol_type = other RNA
ttggactcagagctcctcag

SEQ ID NO: 7723 - RNA, 20 nt, synthetic construct
  source 1..20: mol_type = other RNA
ctcattggactcagagctcc

SEQ ID NO: 7724 - RNA, 20 nt, synthetic construct
  source 1..20: mol_type = other RNA
gtgtaactgggcctatgagc

SEQ ID NO: 7725 - RNA, 20 nt, synthetic construct
  source 1..20: mol_type = other RNA
taggcccagttacactgagg

SEQ ID NO: 7726 - RNA, 20 nt, synthetic construct
  source 1..20: mol_type = other RNA
gttgctcataggcccagtta

SEQ ID NO: 7727 - RNA, 20 nt, synthetic construct
  source 1..20: mol_type = other RNA
tctgttgctcataggcccag

SEQ ID NO: 7728 - RNA, 20 nt, synthetic construct
  source 1..20: mol_type = other RNA
aattattcagggttctcctc

SEQ ID NO: 7729 - RNA, 20 nt, synthetic construct
  source 1..20: mol_type = other RNA
tctacttctccaattattca

SEQ ID NO: 7730 - RNA, 20 nt, synthetic construct
  source 1..20: mol_type = other RNA
tgaaatagggctattactat

SEQ ID NO: 7731 - RNA, 20 nt, synthetic construct
  source 1..20: mol_type = other RNA
tgcagttctttcttaggttt

SEQ ID NO: 7732 - RNA, 20 nt, synthetic construct
  source 1..20: mol_type = other RNA
gtttcttcccaataacagaa

SEQ ID NO: 7733 - RNA, 20 nt, synthetic construct
  source 1..20: mol_type = other RNA
gagatacccttgcccttgtg

SEQ ID NO: 7734 - RNA, 20 nt, synthetic construct
  source 1..20: mol_type = other RNA
gagtcagaatgcctgggtcc

SEQ ID NO: 7735 - RNA, 20 nt, synthetic construct
  source 1..20: mol_type = other RNA
agtgaaggcagcagccccaa

SEQ ID NO: 7736 - RNA, 20 nt, synthetic construct
  source 1..20: mol_type = other RNA
acatgacagggaggaagctt

SEQ ID NO: 7737 - RNA, 20 nt, synthetic construct
  source 1..20: mol_type = other RNA
ctgtcatgtggagatgcatt

SEQ ID NO: 7738 - RNA, 20 nt, synthetic construct
  source 1..20: mol_type = other RNA
gggctgcaggtgcccgctgg

SEQ ID NO: 7739 - RNA, 20 nt, synthetic construct
  source 1..20: mol_type = other RNA
aacgttggggcatcaatcag

SEQ ID NO: 7740 - RNA, 20 nt, synthetic construct
  source 1..20: mol_type = other RNA
tcctccaacgttggggcatc

SEQ ID NO: 7741 - RNA, 20 nt, synthetic construct
  source 1..20: mol_type = other RNA
tggggctcatcctccaacgt

SEQ ID NO: 7742 - RNA, 20 nt, synthetic construct
  source 1..20: mol_type = other RNA
acctttgtccttgggtaccg

SEQ ID NO: 7743 - RNA, 20 nt, synthetic construct
  source 1..20: mol_type = other RNA
tccacctttgtccttgggta

SEQ ID NO: 7744 - RNA, 20 nt, synthetic construct
  source 1..20: mol_type = other RNA
ttctcctccacctttgtcct

SEQ ID NO: 7745 - RNA, 20 nt, synthetic construct
  source 1..20: mol_type = other RNA
ccacctgtgtccgaagcctc

SEQ ID NO: 7746 - RNA, 20 nt, synthetic construct
  source 1..20: mol_type = other RNA
ggttcctccccacctgtgtc

SEQ ID NO: 7747 - RNA, 20 nt, synthetic construct
  source 1..20: mol_type = other RNA
tccttctcaggttcctcccc

SEQ ID NO: 7748 - RNA, 20 nt, synthetic construct
  source 1..20: mol_type = other RNA
atctggcagcccatagtaca

SEQ ID NO: 7749 - RNA, 20 nt, synthetic construct
  source 1..20: mol_type = other RNA
tcccggacaaggagctgggt

SEQ ID NO: 7750 - RNA, 20 nt, synthetic construct
  source 1..20: mol_type = other RNA
cggacaaggagctgggtttt

SEQ ID NO: 7751 - RNA, 20 nt, synthetic construct
  source 1..20: mol_type = other RNA
ttgtccgggaggaggtcccc

SEQ ID NO: 7752 - RNA, 20 nt, synthetic construct
  source 1..20: mol_type = other RNA
aaacccagctccttgtccgg

SEQ ID NO: 7753 - RNA, 20 nt, synthetic construct
  source 1..20: mol_type = other RNA
gccttgggtgtcaggctcaa

SEQ ID NO: 7754 - RNA, 20 nt, synthetic construct
  source 1..20: mol_type = other RNA
gtagcttctagtctggaact

SEQ ID NO: 7755 - RNA, 20 nt, synthetic construct
  source 1..20: mol_type = other RNA
acaaatcatattttgccttc

SEQ ID NO: 7756 - RNA, 20 nt, synthetic construct
  source 1..20: mol_type = other RNA
gagaggaaccttccttggtg

SEQ ID NO: 7757 - RNA, 20 nt, synthetic construct
  source 1..20: mol_type = other RNA
gaggtcagctttgggggaag

SEQ ID NO: 7758 - RNA, 20 nt, synthetic construct
  source 1..20: mol_type = other RNA
cagaggtcagctttggggga

SEQ ID NO: 7759 - RNA, 20 nt, synthetic construct
  source 1..20: mol_type = other RNA
ctctgggcccctgatccttt

SEQ ID NO: 7760 - RNA, 20 nt, synthetic construct
  source 1..20: mol_type = other RNA
gggcccctgatcctttgtga

SEQ ID NO: 7761 - RNA, 20 nt, synthetic construct
  source 1..20: mol_type = other RNA
gcagctgccaggatcctggg

SEQ ID NO: 7762 - RNA, 20 nt, synthetic construct
  source 1..20: mol_type = other RNA
aaccaggaccacgccctcag

SEQ ID NO: 7763 - RNA, 20 nt, synthetic construct
  source 1..20: mol_type = other RNA
gagcctgcaccctgggccac

SEQ ID NO: 7764 - RNA, 20 nt, synthetic construct
  source 1..20: mol_type = other RNA
gagggcgtggtcctggtttg

SEQ ID NO: 7765 - RNA, 20 nt, synthetic construct
  source 1..20: mol_type = other RNA
caggtggcccagggtgcagg

SEQ ID NO: 7766 - RNA, 20 nt, synthetic construct
  source 1..20: mol_type = other RNA
gactcccaggtggcccaggg

SEQ ID NO: 7767 - RNA, 20 nt, synthetic construct
  source 1..20: mol_type = other RNA
acccagaaccccatagccca

SEQ ID NO: 7768 - RNA, 20 nt, synthetic construct
  source 1..20: mol_type = other RNA
acccggaagcccttccctag

SEQ ID NO: 7769 - RNA, 20 nt, synthetic construct
  source 1..20: mol_type = other RNA
ttccctaggccaggaccccc

SEQ ID NO: 7770 - RNA, 20 nt, synthetic construct
  source 1..20: mol_type = other RNA
gcagtgaaggatgccacagg

SEQ ID NO: 7771 - RNA, 20 nt, synthetic construct
  source 1..20: mol_type = other RNA
ctgctgtcatgactcaggac

SEQ ID NO: 7772 - RNA, 20 nt, synthetic construct
  source 1..20: mol_type = other RNA
gctgtcatgactcaggacag

SEQ ID NO: 7773 - RNA, 20 nt, synthetic construct
  source 1..20: mol_type = other RNA
ggacaggagttcctggtcac

SEQ ID NO: 7774 - RNA, 20 nt, synthetic construct
  source 1..20: mol_type = other RNA
tgtcctgagtcatgacagca

SEQ ID NO: 7775 - RNA, 20 nt, synthetic construct
  source 1..20: mol_type = other RNA
gctgtgaccaggaactcctg

SEQ ID NO: 7776 - RNA, 20 nt, synthetic construct
  source 1..20: mol_type = other RNA
tccgaagactcagctgtgac

SEQ ID NO: 7777 - RNA, 20 nt, synthetic construct
  source 1..20: mol_type = other RNA
cctcatccgaagactcagct

SEQ ID NO: 7778 - RNA, 20 nt, synthetic construct
  source 1..20: mol_type = other RNA
tgtgctctgttgcctaaggc

SEQ ID NO: 7779 - RNA, 20 nt, synthetic construct
  source 1..20: mol_type = other RNA
gttgcctaaggcagggcagc

SEQ ID NO: 7780 - RNA, 20 nt, synthetic construct
  source 1..20: mol_type = other RNA
gggcaggatacgtgaggcct

SEQ ID NO: 7781 - RNA, 20 nt, synthetic construct
  source 1..20: mol_type = other RNA
cgtatcctgccccgagggaa

SEQ ID NO: 7782 - RNA, 20 nt, synthetic construct
  source 1..20: mol_type = other RNA
ggtgcccgtcaggcgtaagg

SEQ ID NO: 7783 - RNA, 20 nt, synthetic construct
  source 1..20: mol_type = other RNA
tccggaagtaagccctcact

SEQ ID NO: 7784 - RNA, 20 nt, synthetic construct
  source 1..20: mol_type = other RNA
ctgcagtggcatgaccgtgg

SEQ ID NO: 7785 - RNA, 20 nt, synthetic construct
  source 1..20: mol_type = other RNA
ggagtgattccccacacccc

SEQ ID NO: 7786 - RNA, 20 nt, synthetic construct
  source 1..20: mol_type = other RNA
tgagattcagcaccacacag

SEQ ID NO: 7787 - RNA, 20 nt, synthetic construct
  source 1..20: mol_type = other RNA
tgtttaagtctaaagccact

SEQ ID NO: 7788 - RNA, 20 nt, synthetic construct
  source 1..20: mol_type = other RNA
ggttgctgggcctgccagca

SEQ ID NO: 7789 - RNA, 20 nt, synthetic construct
  source 1..20: mol_type = other RNA
agaacagggttaccatcttc

SEQ ID NO: 7790 - RNA, 20 nt, synthetic construct
  source 1..20: mol_type = other RNA
actaccccaagccccctgca

SEQ ID NO: 7791 - RNA, 20 nt, synthetic construct
  source 1..20: mol_type = other RNA
ctccactaccccaagccccc

SEQ ID NO: 7792 - RNA, 20 nt, synthetic construct
  source 1..20: mol_type = other RNA
ccatctcactccactacccc

SEQ ID NO: 7793 - RNA, 20 nt, synthetic construct
  source 1..20: mol_type = other RNA
ctggctcttgctgcatgatg

SEQ ID NO: 7794 - RNA, 20 nt, synthetic construct
  source 1..20: mol_type = other RNA
tgctgcatgatggggagacc

SEQ ID NO: 7795 - RNA, 20 nt, synthetic construct
  source 1..20: mol_type = other RNA
ccatcatgcagcaagagcca

SEQ ID NO: 7796 - RNA, 20 nt, synthetic construct
  source 1..20: mol_type = other RNA
gctaagttattaggaggccc

SEQ ID NO: 7797 - RNA, 20 nt, synthetic construct
  source 1..20: mol_type = other RNA
taataacttagcagaggcag

SEQ ID NO: 7798 - RNA, 20 nt, synthetic construct
  source 1..20: mol_type = other RNA
aagatacctcatttggatga

SEQ ID NO: 7799 - RNA, 20 nt, synthetic construct
  source 1..20: mol_type = other RNA
tttggatgatacaatgttac

SEQ ID NO: 7800 - RNA, 20 nt, synthetic construct
  source 1..20: mol_type = other RNA
gtgacctttgacaagtctgg

SEQ ID NO: 7801 - RNA, 20 nt, synthetic construct
  source 1..20: mol_type = other RNA
gtagccctcagctttctcat

SEQ ID NO: 7802 - RNA, 20 nt, synthetic construct
  source 1..20: mol_type = other RNA
gctttctcatgtgcaaatga

SEQ ID NO: 7803 - RNA, 20 nt, synthetic construct
  source 1..20: mol_type = other RNA
tgtgcaaatgacagatgaag

SEQ ID NO: 7804 - RNA, 20 nt, synthetic construct
  source 1..20: mol_type = other RNA
cagtggtctttggctgcagg

SEQ ID NO: 7805 - RNA, 20 nt, synthetic construct
  source 1..20: mol_type = other RNA
cctgtggttaacaagctggg

SEQ ID NO: 7806 - RNA, 20 nt, synthetic construct
  source 1..20: mol_type = other RNA
ccctggttcgctgtggtgtt

SEQ ID NO: 7807 - RNA, 20 nt, synthetic construct
  source 1..20: mol_type = other RNA
gaaagaggtattagaaagga

SEQ ID NO: 7808 - RNA, 20 nt, synthetic construct
  source 1..20: mol_type = other RNA
ttcagagactccccctggtt

SEQ ID NO: 7809 - RNA, 20 nt, synthetic construct
  source 1..20: mol_type = other RNA
cctgtcaggttggagggact

SEQ ID NO: 7810 - RNA, 20 nt, synthetic construct
  source 1..20: mol_type = other RNA
tgtcaggttggagggactct

SEQ ID NO: 7811 - RNA, 20 nt, synthetic construct
  source 1..20: mol_type = other RNA
aacctgacaggagagtgacc

SEQ ID NO: 7812 - RNA, 20 nt, synthetic construct
  source 1..20: mol_type = other RNA
ggaagtttccaccctctgga

SEQ ID NO: 7813 - RNA, 20 nt, synthetic construct
  source 1..20: mol_type = other RNA
ggagagggaaaggccctgga

SEQ ID NO: 7814 - RNA, 20 nt, synthetic construct
  source 1..20: mol_type = other RNA
agagggtggaaacttccaga

SEQ ID NO: 7815 - RNA, 20 nt, synthetic construct
  source 1..20: mol_type = other RNA
ccagagggtggaaacttcca

SEQ ID NO: 7816 - RNA, 20 nt, synthetic construct
  source 1..20: mol_type = other RNA
agggcctttccctctccaga

SEQ ID NO: 7817 - RNA, 20 nt, synthetic construct
  source 1..20: mol_type = other RNA
gccgaccgctcgccatgacc

SEQ ID NO: 7818 - RNA, 20 nt, synthetic construct
  source 1..20: mol_type = other RNA
ccatgaccttgggtacatca

SEQ ID NO: 7819 - RNA, 20 nt, synthetic construct
  source 1..20: mol_type = other RNA
ctgggctcctctattctctg

SEQ ID NO: 7820 - RNA, 20 nt, synthetic construct
  source 1..20: mol_type = other RNA
tctattctctgtaaaattgg

SEQ ID NO: 7821 - RNA, 20 nt, synthetic construct
  source 1..20: mol_type = other RNA
attctctgtaaaattgggtg

SEQ ID NO: 7822 - RNA, 20 nt, synthetic construct
  source 1..20: mol_type = other RNA
gtaaaattgggtgagggtgg

SEQ ID NO: 7823 - RNA, 20 nt, synthetic construct
  source 1..20: mol_type = other RNA
agaatcagaaagacctggtt

SEQ ID NO: 7824 - RNA, 20 nt, synthetic construct
  source 1..20: mol_type = other RNA
cagagcctcaatgtccacat

SEQ ID NO: 7825 - RNA, 20 nt, synthetic construct
  source 1..20: mol_type = other RNA
gagcctcaatgtccacattt

SEQ ID NO: 7826 - RNA, 20 nt, synthetic construct
  source 1..20: mol_type = other RNA
gagaggggctgtgacttgtc

SEQ ID NO: 7827 - RNA, 20 nt, synthetic construct
  source 1..20: mol_type = other RNA
atgtccacatttatgcagtg

SEQ ID NO: 7828 - RNA, 20 nt, synthetic construct
  source 1..20: mol_type = other RNA
ccactgcataaatgtggaca

SEQ ID NO: 7829 - RNA, 20 nt, synthetic construct
  source 1..20: mol_type = other RNA
ctcttgggcttttgtggaga

SEQ ID NO: 7830 - RNA, 20 nt, synthetic construct
  source 1..20: mol_type = other RNA
tgggcttttgtggagaagaa

SEQ ID NO: 7831 - RNA, 20 nt, synthetic construct
  source 1..20: mol_type = other RNA
gtggaaccttgctgcctgac

SEQ ID NO: 7832 - RNA, 20 nt, synthetic construct
  source 1..20: mol_type = other RNA
ctgtgctagtgtggagggag

SEQ ID NO: 7833 - RNA, 20 nt, synthetic construct
  source 1..20: mol_type = other RNA
acactagcacagggagatgc

SEQ ID NO: 7834 - RNA, 20 nt, synthetic construct
  source 1..20: mol_type = other RNA
ctccacactagcacagggag

SEQ ID NO: 7835 - RNA, 20 nt, synthetic construct
  source 1..20: mol_type = other RNA
tcccccagtacctagcacag

SEQ ID NO: 7836 - RNA, 20 nt, synthetic construct
  source 1..20: mol_type = other RNA
ggggaatgcaaattaaaaca

SEQ ID NO: 7837 - RNA, 20 nt, synthetic construct
  source 1..20: mol_type = other RNA
acctattattatctttatta

SEQ ID NO: 7838 - RNA, 20 nt, synthetic construct
  source 1..20: mol_type = other RNA
acattctgccagctccacct

SEQ ID NO: 7839 - RNA, 20 nt, synthetic construct
  source 1..20: mol_type = other RNA
gttcctccacattctgccag

SEQ ID NO: 7840 - RNA, 20 nt, synthetic construct
  source 1..20: mol_type = other RNA
ttctgacgttgctgatgtga

SEQ ID NO: 7841 - RNA, 20 nt, synthetic construct
  source 1..20: mol_type = other RNA
ctcactcatttaacaacaat

SEQ ID NO: 7842 - RNA, 20 nt, synthetic construct
  source 1..20: mol_type = other RNA
taattatacattacaaaatc

SEQ ID NO: 7843 - RNA, 20 nt, synthetic construct
  source 1..20: mol_type = other RNA
ttctcttaattatacattac

SEQ ID NO: 7844 - RNA, 20 nt, synthetic construct
  source 1..20: mol_type = other RNA
ctttctcttaattatacatt

SEQ ID NO: 7845 - RNA, 20 nt, synthetic construct
  source 1..20: mol_type = other RNA
ttccttgattttgtttgtga

SEQ ID NO: 7846 - RNA, 20 nt, synthetic construct
  source 1..20: mol_type = other RNA
caaacaaaatcaaggaagga

SEQ ID NO: 7847 - RNA, 20 nt, synthetic construct
  source 1..20: mol_type = other RNA
ctcacaaacaaaatcaagga

SEQ ID NO: 7848 - RNA, 20 nt, synthetic construct
  source 1..20: mol_type = other RNA
gctgctggaggtggtcctga

SEQ ID NO: 7849 - RNA, 20 nt, synthetic construct
  source 1..20: mol_type = other RNA
agcagcagagaaaaggattg

SEQ ID NO: 7850 - RNA, 20 nt, synthetic construct
  source 1..20: mol_type = other RNA
ggaccacctccagcagcaga

SEQ ID NO: 7851 - RNA, 20 nt, synthetic construct
  source 1..20: mol_type = other RNA
atctcaggaccacctccagc

SEQ ID NO: 7852 - RNA, 20 nt, synthetic construct
  source 1..20: mol_type = other RNA
ttaggtcttactggccagaa

SEQ ID NO: 7853 - RNA, 20 nt, synthetic construct
  source 1..20: mol_type = other RNA
agccactacatctgttttca

SEQ ID NO: 7854 - RNA, 20 nt, synthetic construct
  source 1..20: mol_type = other RNA
tgactgcaagacagctgctg

SEQ ID NO: 7855 - RNA, 20 nt, synthetic construct
  source 1..20: mol_type = other RNA
tggaatttccctcatgactg

SEQ ID NO: 7856 - RNA, 20 nt, synthetic construct
  source 1..20: mol_type = other RNA
gtgaatctcttggaatttcc

SEQ ID NO: 7857 - RNA, 20 nt, synthetic construct
  source 1..20: mol_type = other RNA
gctttctgaaaatatgtatt

SEQ ID NO: 7858 - RNA, 20 nt, synthetic construct
  source 1..20: mol_type = other RNA
tcccacaacaaatccaggtc

SEQ ID NO: 7859 - RNA, 20 nt, synthetic construct
  source 1..20: mol_type = other RNA
aggtcattttcatgcagatg

SEQ ID NO: 7860 - RNA, 20 nt, synthetic construct
  source 1..20: mol_type = other RNA
aattttcctcaaggtcattt

SEQ ID NO: 7861 - RNA, 20 nt, synthetic construct
  source 1..20: mol_type = other RNA
tccaattttcctcaaggtca

SEQ ID NO: 7862 - RNA, 20 nt, synthetic construct
  source 1..20: mol_type = other RNA
cctccaattttcctcaaggt

SEQ ID NO: 7863 - RNA, 20 nt, synthetic construct
  source 1..20: mol_type = other RNA
tggggacctcagtggttgtt

SEQ ID NO: 7864 - RNA, 20 nt, synthetic construct
  source 1..20: mol_type = other RNA
gtggttgttgctgggctggg

SEQ ID NO: 7865 - RNA, 20 nt, synthetic construct
  source 1..20: mol_type = other RNA
aaaacccagcccagcaacaa

SEQ ID NO: 7866 - RNA, 20 nt, synthetic construct
  source 1..20: mol_type = other RNA
ctggctgagatggctgactt

SEQ ID NO: 7867 - RNA, 20 nt, synthetic construct
  source 1..20: mol_type = other RNA
gccagggaggaaggtcagat

SEQ ID NO: 7868 - RNA, 20 nt, synthetic construct
  source 1..20: mol_type = other RNA
gcaccattaacaccctgacg

SEQ ID NO: 7869 - RNA, 20 nt, synthetic construct
  source 1..20: mol_type = other RNA
tcagggtgttaatggtgcag

SEQ ID NO: 7870 - RNA, 20 nt, synthetic construct
  source 1..20: mol_type = other RNA
tcgtcagggtgttaatggtg

SEQ ID NO: 7871 - RNA, 20 nt, synthetic construct
  source 1..20: mol_type = other RNA
cccctaggccaaaatatttc

SEQ ID NO: 7872 - RNA, 20 nt, synthetic construct
  source 1..20: mol_type = other RNA
cggtccccacctccacttgc

SEQ ID NO: 7873 - RNA, 20 nt, synthetic construct
  source 1..20: mol_type = other RNA
acttgccctggggcccgggc

SEQ ID NO: 7874 - RNA, 20 nt, synthetic construct
  source 1..20: mol_type = other RNA
gagcactgatgcaaatcggg

SEQ ID NO: 7875 - RNA, 20 nt, synthetic construct
  source 1..20: mol_type = other RNA
gaggtccagggtgaaaggaa

SEQ ID NO: 7876 - RNA, 20 nt, synthetic construct
  source 1..20: mol_type = other RNA
acacaaatacccaactgggt

SEQ ID NO: 7877 - RNA, 20 nt, synthetic construct
  source 1..20: mol_type = other RNA
tccacacaaatacccaactg

SEQ ID NO: 7878 - RNA, 20 nt, synthetic construct
  source 1..20: mol_type = other RNA
gatcccgtccttcctccccc

SEQ ID NO: 7879 - RNA, 20 nt, synthetic construct
  source 1..20: mol_type = other RNA
ccctccatgcttgcctcatg

SEQ ID NO: 7880 - RNA, 20 nt, synthetic construct
  source 1..20: mol_type = other RNA
atgcttgcctcatgtcagga

SEQ ID NO: 7881 - RNA, 20 nt, synthetic construct
  source 1..20: mol_type = other RNA
tgtcaggactttctaaagca

SEQ ID NO: 7882 - RNA, 20 nt, synthetic construct
  source 1..20: mol_type = other RNA
tcagtgaggggagagtgatt

SEQ ID NO: 7883 - RNA, 20 nt, synthetic construct
  source 1..20: mol_type = other RNA
gtgaggggagagtgattgcc

SEQ ID NO: 7884 - RNA, 20 nt, synthetic construct
  source 1..20: mol_type = other RNA
ctgaggagatgcaaagtcca

SEQ ID NO: 7885 - RNA, 20 nt, synthetic construct
  source 1..20: mol_type = other RNA
cctcactgaggagatgcaaa

SEQ ID NO: 7886 - RNA, 20 nt, synthetic construct
  source 1..20: mol_type = other RNA
cccctcactgaggagatgca

SEQ ID NO: 7887 - RNA, 20 nt, synthetic construct
  source 1..20: mol_type = other RNA
tcagcagaacagtggcaatc

SEQ ID NO: 7888 - RNA, 20 nt, synthetic construct
  source 1..20: mol_type = other RNA
gttcactcatcagcagaaca

SEQ ID NO: 7889 - RNA, 20 nt, synthetic construct
  source 1..20: mol_type = other RNA
gaaaggggcaagttgttgcc

SEQ ID NO: 7890 - RNA, 20 nt, synthetic construct
  source 1..20: mol_type = other RNA
gctacaaattcacggtgtga

SEQ ID NO: 7891 - RNA, 20 nt, synthetic construct
  source 1..20: mol_type = other RNA
tgttctggatctccgcctgg

SEQ ID NO: 7892 - RNA, 20 nt, synthetic construct
  source 1..20: mol_type = other RNA
gcctgggtcgtgtcccatct

SEQ ID NO: 7893 - RNA, 20 nt, synthetic construct
  source 1..20: mol_type = other RNA
acaacatccccttccccctt

SEQ ID NO: 7894 - RNA, 20 nt, synthetic construct
  source 1..20: mol_type = other RNA
tcatgatagccactgtcacc

SEQ ID NO: 7895 - RNA, 20 nt, synthetic construct
  source 1..20: mol_type = other RNA
tgatagccactgtcaccacc

SEQ ID NO: 7896 - RNA, 20 nt, synthetic construct
  source 1..20: mol_type = other RNA
agcctgtgctcattatcaca

SEQ ID NO: 7897 - RNA, 20 nt, synthetic construct
  source 1..20: mol_type = other RNA
ttatcacatggcccctcaca

SEQ ID NO: 7898 - RNA, 20 nt, synthetic construct
  source 1..20: mol_type = other RNA
cagggtactgtctccaggct

SEQ ID NO: 7899 - RNA, 20 nt, synthetic construct
  source 1..20: mol_type = other RNA
aggctggaccccaccacacc

SEQ ID NO: 7900 - RNA, 20 nt, synthetic construct
  source 1..20: mol_type = other RNA
ggtgggtgtggtggggtcca

SEQ ID NO: 7901 - RNA, 20 nt, synthetic construct
  source 1..20: mol_type = other RNA
taagtggtagttgggctcta

SEQ ID NO: 7902 - RNA, 20 nt, synthetic construct
  source 1..20: mol_type = other RNA
aaaaccactctctccagacc

SEQ ID NO: 7903 - RNA, 20 nt, synthetic construct
  source 1..20: mol_type = other RNA
ctccagaccaaagcgaattg

SEQ ID NO: 7904 - RNA, 20 nt, synthetic construct
  source 1..20: mol_type = other RNA
ccagaccaaagcgaattgga

SEQ ID NO: 7905 - RNA, 20 nt, synthetic construct
  source 1..20: mol_type = other RNA
agaccaaagcgaattggact

SEQ ID NO: 7906 - RNA, 20 nt, synthetic construct
  source 1..20: mol_type = other RNA
tacagctgggacccccttta

SEQ ID NO: 7907 - RNA, 20 nt, synthetic construct
  source 1..20: mol_type = other RNA
tggtccagcagaagagattg

SEQ ID NO: 7908 - RNA, 20 nt, synthetic construct
  source 1..20: mol_type = other RNA
tctgctggaccaggagctcc

SEQ ID NO: 7909 - RNA, 20 nt, synthetic construct
  source 1..20: mol_type = other RNA
atgtgacaatctcttctgct

SEQ ID NO: 7910 - RNA, 20 nt, synthetic construct
  source 1..20: mol_type = other RNA
cttggcaaagagaagagggg

SEQ ID NO: 7911 - RNA, 20 nt, synthetic construct
  source 1..20: mol_type = other RNA
ttgccaagggagtcctctat

SEQ ID NO: 7912 - RNA, 20 nt, synthetic construct
  source 1..20: mol_type = other RNA
tctctttgccaagggagtcc

SEQ ID NO: 7913 - RNA, 20 nt, synthetic construct
  source 1..20: mol_type = other RNA
ctgaactttctgccctatgt

SEQ ID NO: 7914 - RNA, 20 nt, synthetic construct
  source 1..20: mol_type = other RNA
aggcagcactccctgaactt

SEQ ID NO: 7915 - RNA, 20 nt, synthetic construct
  source 1..20: mol_type = other RNA
tccaggcagcactccctgaa

SEQ ID NO: 7916 - RNA, 20 nt, synthetic construct
  source 1..20: mol_type = other RNA
tcctccaggcagcactccct

SEQ ID NO: 7917 - RNA, 20 nt, synthetic construct
  source 1..20: mol_type = other RNA
tgacacccaccccaagggtc

SEQ ID NO: 7918 - RNA, 20 nt, synthetic construct
  source 1..20: mol_type = other RNA
tggaatgcccttcccagcat

SEQ ID NO: 7919 - RNA, 20 nt, synthetic construct
  source 1..20: mol_type = other RNA
tgctatgccttcctcctgga

SEQ ID NO: 7920 - RNA, 20 nt, synthetic construct
  source 1..20: mol_type = other RNA
gcagccatggctcatgctat

SEQ ID NO: 7921 - RNA, 20 nt, synthetic construct
  source 1..20: mol_type = other RNA
actctgcagccatggctcat

SEQ ID NO: 7922 - RNA, 20 nt, synthetic construct
  source 1..20: mol_type = other RNA
agcagtccaggtcacccagc

SEQ ID NO: 7923 - RNA, 20 nt, synthetic construct
  source 1..20: mol_type = other RNA
ctgaaaatgtagcactgcct

SEQ ID NO: 7924 - RNA, 20 nt, synthetic construct
  source 1..20: mol_type = other RNA
tgaggagtttatgaaatgca

SEQ ID NO: 7925 - RNA, 20 nt, synthetic construct
  source 1..20: mol_type = other RNA
ggagataccaaagcagccct

SEQ ID NO: 7926 - RNA, 20 nt, synthetic construct
  source 1..20: mol_type = other RNA
tcaggagataccaaagcagc

SEQ ID NO: 7927 - RNA, 20 nt, synthetic construct
  source 1..20: mol_type = other RNA
aggaactgggcccaggaatc

SEQ ID NO: 7928 - RNA, 20 nt, synthetic construct
  source 1..20: mol_type = other RNA
gcctggcccagaatctccag

SEQ ID NO: 7929 - RNA, 20 nt, synthetic construct
  source 1..20: mol_type = other RNA
aagcgggagggtaggaggag

SEQ ID NO: 7930 - RNA, 20 nt, synthetic construct
  source 1..20: mol_type = other RNA
cgctttgagaattgcagatt

SEQ ID NO: 7931 - RNA, 20 nt, synthetic construct
  source 1..20: mol_type = other RNA
taccctcccgctttgagaat

SEQ ID NO: 7932 - RNA, 20 nt, synthetic construct
  source 1..20: mol_type = other RNA
tcctaccctcccgctttgag

SEQ ID NO: 7933 - RNA, 20 nt, synthetic construct
  source 1..20: mol_type = other RNA
ttccaccactctgatgcagg

SEQ ID NO: 7934 - RNA, 20 nt, synthetic construct
  source 1..20: mol_type = other RNA
gatgcaggtggcccctgggc

SEQ ID NO: 7935 - RNA, 20 nt, synthetic construct
  source 1..20: mol_type = other RNA
aagcatggcccaggggccac

SEQ ID NO: 7936 - RNA, 20 nt, synthetic construct
  source 1..20: mol_type = other RNA
gtcctgctagtgtttctcca

SEQ ID NO: 7937 - RNA, 20 nt, synthetic construct
  source 1..20: mol_type = other RNA
gtccaaggccacctcagtcc

SEQ ID NO: 7938 - RNA, 20 nt, synthetic construct
  source 1..20: mol_type = other RNA
acagtgctctgtccaaggcc

SEQ ID NO: 7939 - RNA, 20 nt, synthetic construct
  source 1..20: mol_type = other RNA
accccagacccctccacagt

SEQ ID NO: 7940 - RNA, 20 nt, synthetic construct
  source 1..20: mol_type = other RNA
gcctccaccccagacccctc

SEQ ID NO: 7941 - RNA, 20 nt, synthetic construct
  source 1..20: mol_type = other RNA
acctctgcctccaccccaga

SEQ ID NO: 7942 - RNA, 20 nt, synthetic construct
  source 1..20: mol_type = other RNA
tcctacagcgcactccacct

SEQ ID NO: 7943 - RNA, 20 nt, synthetic construct
  source 1..20: mol_type = other RNA
tggacaagcctattgaaaag

SEQ ID NO: 7944 - RNA, 20 nt, synthetic construct
  source 1..20: mol_type = other RNA
tttcatcattctctagtgct

SEQ ID NO: 7945 - RNA, 20 nt, synthetic construct
  source 1..20: mol_type = other RNA
agtgctcttatcaccaactt

SEQ ID NO: 7946 - RNA, 20 nt, synthetic construct
  source 1..20: mol_type = other RNA
tatcaccaacttataggctg

SEQ ID NO: 7947 - RNA, 20 nt, synthetic construct
  source 1..20: mol_type = other RNA
actatgagggctgcatgaga

SEQ ID NO: 7948 - RNA, 20 nt, synthetic construct
  source 1..20: mol_type = other RNA
tagttgagtgaaacaggtaa

SEQ ID NO: 7949 - RNA, 20 nt, synthetic construct
  source 1..20: mol_type = other RNA
tgcagccctcatagttgagt

SEQ ID NO: 7950 - RNA, 20 nt, synthetic construct
  source 1..20: mol_type = other RNA
cttgatcaccttccatgtta

SEQ ID NO: 7951 - RNA, 20 nt, synthetic construct
  source 1..20: mol_type = other RNA
aaaagaaaaaaaatgcaaac

SEQ ID NO: 7952 - RNA, 20 nt, synthetic construct
  source 1..20: mol_type = other RNA
atctcaaaaagaaaaaaaat

SEQ ID NO: 7953 - RNA, 20 nt, synthetic construct
  source 1..20: mol_type = other RNA
ctcttgtcacccaggatgaa

SEQ ID NO: 7954 - RNA, 20 nt, synthetic construct
  source 1..20: mol_type = other RNA
tgtcacccaggatgaagtgc

SEQ ID NO: 7955 - RNA, 20 nt, synthetic construct
  source 1..20: mol_type = other RNA
gctcaccacaacctccgcct

SEQ ID NO: 7956 - RNA, 20 nt, synthetic construct
  source 1..20: mol_type = other RNA
ccacaacctccgcctcccag

SEQ ID NO: 7957 - RNA, 20 nt, synthetic construct
  source 1..20: mol_type = other RNA
gcctcccaggttcaagcgat

SEQ ID NO: 7958 - RNA, 20 nt, synthetic construct
  source 1..20: mol_type = other RNA
caggttcaagcgattctctg

SEQ ID NO: 7959 - RNA, 20 nt, synthetic construct
  source 1..20: mol_type = other RNA
gcctcagcctaccgagtagc

SEQ ID NO: 7960 - RNA, 20 nt, synthetic construct
  source 1..20: mol_type = other RNA
gcctaccgagtagctgggat

SEQ ID NO: 7961 - RNA, 20 nt, synthetic construct
  source 1..20: mol_type = other RNA
gtaggctgaggcagagaatc

SEQ ID NO: 7962 - RNA, 20 nt, synthetic construct
  source 1..20: mol_type = other RNA
actaaaaacacaaaattagc

SEQ ID NO: 7963 - RNA, 20 nt, synthetic construct
  source 1..20: mol_type = other RNA
atgttggtcaggctggtctt

SEQ ID NO: 7964 - RNA, 20 nt, synthetic construct
  source 1..20: mol_type = other RNA
tgacttcaggtgatccaccc

SEQ ID NO: 7965 - RNA, 20 nt, synthetic construct
  source 1..20: mol_type = other RNA
gcctcccaacgtgttaggat

SEQ ID NO: 7966 - RNA, 20 nt, synthetic construct
  source 1..20: mol_type = other RNA
caacgtgttaggattacagg

SEQ ID NO: 7967 - RNA, 20 nt, synthetic construct
  source 1..20: mol_type = other RNA
cacctgtaatcctaacacgt

SEQ ID NO: 7968 - RNA, 20 nt, synthetic construct
  source 1..20: mol_type = other RNA
tccaccctaaaaaaacaaaa

SEQ ID NO: 7969 - RNA, 20 nt, synthetic construct
  source 1..20: mol_type = other RNA
gatctcttccaccctaaaaa

SEQ ID NO: 7970 - RNA, 20 nt, synthetic construct
  source 1..20: mol_type = other RNA
gcacgctcagatctcttcca

SEQ ID NO: 7971 - RNA, 20 nt, synthetic construct
  source 1..20: mol_type = other RNA
cagcacgctcagatctcttc

SEQ ID NO: 7972 - RNA, 20 nt, synthetic construct
  source 1..20: mol_type = other RNA
ccctttttcctgccagcctc

SEQ ID NO: 7973 - RNA, 20 nt, synthetic construct
  source 1..20: mol_type = other RNA
tttgtacacatcaaggctta

SEQ ID NO: 7974 - RNA, 20 nt, synthetic construct
  source 1..20: mol_type = other RNA
cttttgtacacatcaaggct

SEQ ID NO: 7975 - RNA, 20 nt, synthetic construct
  source 1..20: mol_type = other RNA
gtctctcttttgtacacatc

SEQ ID NO: 7976 - RNA, 20 nt, synthetic construct
  source 1..20: mol_type = other RNA
ctgtctctcttttgtacaca

SEQ ID NO: 7977 - RNA, 20 nt, synthetic construct
  source 1..20: mol_type = other RNA
ctctgtctctcttttgtaca

SEQ ID NO: 7978 - RNA, 20 nt, synthetic construct
  source 1..20: mol_type = other RNA
gacatgtctgcctggctctc

SEQ ID NO: 7979 - RNA, 20 nt, synthetic construct
  source 1..20: mol_type = other RNA
tccctttaagccggcaggga

SEQ ID NO: 7980 - RNA, 20 nt, synthetic construct
  source 1..20: mol_type = other RNA
ctgccggcttaaagggaaga

SEQ ID NO: 7981 - RNA, 20 nt, synthetic construct
  source 1..20: mol_type = other RNA
accctgtatgtccccactcc

SEQ ID NO: 7982 - RNA, 20 nt, synthetic construct
  source 1..20: mol_type = other RNA
ccaccctgtatgtccccact

SEQ ID NO: 7983 - RNA, 20 nt, synthetic construct
  source 1..20: mol_type = other RNA
ttttctccatgaagtggcag

SEQ ID NO: 7984 - RNA, 20 nt, synthetic construct
  source 1..20: mol_type = other RNA
atgaagtggcagacaagggg

SEQ ID NO: 7985 - RNA, 20 nt, synthetic construct
  source 1..20: mol_type = other RNA
tcccaggaagccccttgtct

SEQ ID NO: 7986 - RNA, 20 nt, synthetic construct
  source 1..20: mol_type = other RNA
cttcccaggaagccccttgt

SEQ ID NO: 7987 - RNA, 20 nt, synthetic construct
  source 1..20: mol_type = other RNA
cctctcttcccaggaagccc

SEQ ID NO: 7988 - RNA, 20 nt, synthetic construct
  source 1..20: mol_type = other RNA
tcccctctcttcccaggaag

SEQ ID NO: 7989 - RNA, 20 nt, synthetic construct
  source 1..20: mol_type = other RNA
cctcccctctcttcccagga

SEQ ID NO: 7990 - RNA, 20 nt, synthetic construct
  source 1..20: mol_type = other RNA
tctcctcccctctcttccca

SEQ ID NO: 7991 - RNA, 20 nt, synthetic construct
  source 1..20: mol_type = other RNA
cctctcctcccctctcttcc

SEQ ID NO: 7992 - RNA, 20 nt, synthetic construct
  source 1..20: mol_type = other RNA
accctctcctctcctcccct

SEQ ID NO: 7993 - RNA, 20 nt, synthetic construct
  source 1..20: mol_type = other RNA
gggcccaatgcacatcacca

SEQ ID NO: 7994 - RNA, 20 nt, synthetic construct
  source 1..20: mol_type = other RNA
agaatggctctgggcccaat

SEQ ID NO: 7995 - RNA, 20 nt, synthetic construct
  source 1..20: mol_type = other RNA
acctgctcaagaatggctct

SEQ ID NO: 7996 - RNA, 20 nt, synthetic construct
  source 1..20: mol_type = other RNA
ccacctgctcaagaatggct

SEQ ID NO: 7997 - RNA, 20 nt, synthetic construct
  source 1..20: mol_type = other RNA
aaaatgctttcctctccacc

SEQ ID NO: 7998 - RNA, 20 nt, synthetic construct
  source 1..20: mol_type = other RNA
tttgttcagaatctcccaga

SEQ ID NO: 7999 - RNA, 20 nt, synthetic construct
  source 1..20: mol_type = other RNA
cagagtcccctaacctcagg

SEQ ID NO: 8000 - RNA, 20 nt, synthetic construct
  source 1..20: mol_type = other RNA
gggagattctgaacaaaaga

SEQ ID NO: 8001 - RNA, 20 nt, synthetic construct
  source 1..20: mol_type = other RNA
ggagagggccatgccttggc

SEQ ID NO: 8002 - RNA, 20 nt, synthetic construct
  source 1..20: mol_type = other RNA
tgaggttaggggactctggg

SEQ ID NO: 8003 - RNA, 20 nt, synthetic construct
  source 1..20: mol_type = other RNA
cctgaggttaggggactctg

SEQ ID NO: 8004 - RNA, 20 nt, synthetic construct
  source 1..20: mol_type = other RNA
agaggcgttaaaaaccagcc

SEQ ID NO: 8005 - RNA, 20 nt, synthetic construct
  source 1..20: mol_type = other RNA
aggccaaggcatggccctct

SEQ ID NO: 8006 - RNA, 20 nt, synthetic construct
  source 1..20: mol_type = other RNA
cgaggccaaggcatggccct

SEQ ID NO: 8007 - RNA, 20 nt, synthetic construct
  source 1..20: mol_type = other RNA
catctcagtgtctccagctg

SEQ ID NO: 8008 - RNA, 20 nt, synthetic construct
  source 1..20: mol_type = other RNA
gtgtctccagctgggccatg

SEQ ID NO: 8009 - RNA, 20 nt, synthetic construct
  source 1..20: mol_type = other RNA
agctgggccatgcactgctt

SEQ ID NO: 8010 - RNA, 20 nt, synthetic construct
  source 1..20: mol_type = other RNA
ggatctgtggtccagttata

SEQ ID NO: 8011 - RNA, 20 nt, synthetic construct
  source 1..20: mol_type = other RNA
aggaagccggcccggattca

SEQ ID NO: 8012 - RNA, 20 nt, synthetic construct
  source 1..20: mol_type = other RNA
gtcagatgggcactgaatcc

SEQ ID NO: 8013 - RNA, 20 nt, synthetic construct
  source 1..20: mol_type = other RNA
cagaagggacaggctaggtg

SEQ ID NO: 8014 - RNA, 20 nt, synthetic construct
  source 1..20: mol_type = other RNA
tcttgcctcctatcacagtc

SEQ ID NO: 8015 - RNA, 20 nt, synthetic construct
  source 1..20: mol_type = other RNA
tgcctcctatcacagtcgcc

SEQ ID NO: 8016 - RNA, 20 nt, synthetic construct
  source 1..20: mol_type = other RNA
tatcacagtcgcctgtgctc

SEQ ID NO: 8017 - RNA, 20 nt, synthetic construct
  source 1..20: mol_type = other RNA
catctgcctccctgtggact

SEQ ID NO: 8018 - RNA, 20 nt, synthetic construct
  source 1..20: mol_type = other RNA
tctgcctccctgtggactct

SEQ ID NO: 8019 - RNA, 20 nt, synthetic construct
  source 1..20: mol_type = other RNA
ctgtggactctgaggatgag

SEQ ID NO: 8020 - RNA, 20 nt, synthetic construct
  source 1..20: mol_type = other RNA
gaggatgaggcgagggctga

SEQ ID NO: 8021 - RNA, 20 nt, synthetic construct
  source 1..20: mol_type = other RNA
gagtccacagggaggcagat

SEQ ID NO: 8022 - RNA, 20 nt, synthetic construct
  source 1..20: mol_type = other RNA
tcctcagagtccacagggag

SEQ ID NO: 8023 - RNA, 20 nt, synthetic construct
  source 1..20: mol_type = other RNA
cctcatcctcagagtccaca

SEQ ID NO: 8024 - RNA, 20 nt, synthetic construct
  source 1..20: mol_type = other RNA
ggggtgagagcaggtgccag

SEQ ID NO: 8025 - RNA, 20 nt, synthetic construct
  source 1..20: mol_type = other RNA
cccctgagctgaatcagccc

SEQ ID NO: 8026 - RNA, 20 nt, synthetic construct
  source 1..20: mol_type = other RNA
cacccctgagctgaatcagc

SEQ ID NO: 8027 - RNA, 20 nt, synthetic construct
  source 1..20: mol_type = other RNA
gatgacaggtacctggcgcc

SEQ ID NO: 8028 - RNA, 20 nt, synthetic construct
  source 1..20: mol_type = other RNA
gctggtctagctgggcaagg

SEQ ID NO: 8029 - RNA, 20 nt, synthetic construct
  source 1..20: mol_type = other RNA
agagtggccggaagcttcct

SEQ ID NO: 8030 - RNA, 20 nt, synthetic construct
  source 1..20: mol_type = other RNA
ggagcagcagccttgcccag

SEQ ID NO: 8031 - RNA, 20 nt, synthetic construct
  source 1..20: mol_type = other RNA
caggaagcttccggccactc

SEQ ID NO: 8032 - RNA, 20 nt, synthetic construct
  source 1..20: mol_type = other RNA
cccaggaagcttccggccac

SEQ ID NO: 8033 - RNA, 20 nt, synthetic construct
  source 1..20: mol_type = other RNA
gggcctgtccctctctccct

SEQ ID NO: 8034 - RNA, 20 nt, synthetic construct
  source 1..20: mol_type = other RNA
ctccctattccttccttcct

SEQ ID NO: 8035 - RNA, 20 nt, synthetic construct
  source 1..20: mol_type = other RNA
ccctattccttccttcctcc

SEQ ID NO: 8036 - RNA, 20 nt, synthetic construct
  source 1..20: mol_type = other RNA
ctattccttccttcctccct

SEQ ID NO: 8037 - RNA, 20 nt, synthetic construct
  source 1..20: mol_type = other RNA
cttcctgaaactgcgtcctc

SEQ ID NO: 8038 - RNA, 20 nt, synthetic construct
  source 1..20: mol_type = other RNA
aaatcctgctccagcaccag

SEQ ID NO: 8039 - RNA, 20 nt, synthetic construct
  source 1..20: mol_type = other RNA
agcaccagcaaccccctgct

SEQ ID NO: 8040 - RNA, 20 nt, synthetic construct
  source 1..20: mol_type = other RNA
ggcagcgtttcggtcccttt

SEQ ID NO: 8041 - RNA, 20 nt, synthetic construct
  source 1..20: mol_type = other RNA
ggcggggggaaaggactgca

SEQ ID NO: 8042 - RNA, 20 nt, synthetic construct
  source 1..20: mol_type = other RNA
caggcggggggaaaggactg

SEQ ID NO: 8043 - RNA, 20 nt, synthetic construct
  source 1..20: mol_type = other RNA
ttgctctcagtgccccactc

SEQ ID NO: 8044 - RNA, 20 nt, synthetic construct
  source 1..20: mol_type = other RNA
cagtgccccactctctggat

SEQ ID NO: 8045 - RNA, 20 nt, synthetic construct
  source 1..20: mol_type = other RNA
gtgccccactctctggatca

SEQ ID NO: 8046 - RNA, 20 nt, synthetic construct
  source 1..20: mol_type = other RNA
ctggatcattgtccttctct

SEQ ID NO: 8047 - RNA, 20 nt, synthetic construct
  source 1..20: mol_type = other RNA
ggatcattgtccttctctcc

SEQ ID NO: 8048 - RNA, 20 nt, synthetic construct
  source 1..20: mol_type = other RNA
cctccataaacgcagtcatg

SEQ ID NO: 8049 - RNA, 20 nt, synthetic construct
  source 1..20: mol_type = other RNA
tccataaacgcagtcatgcg

SEQ ID NO: 8050 - RNA, 20 nt, synthetic construct
  source 1..20: mol_type = other RNA
ataaacgcagtcatgcgcca

SEQ ID NO: 8051 - RNA, 20 nt, synthetic construct
  source 1..20: mol_type = other RNA
gttgtaatcttatggaacca

SEQ ID NO: 8052 - RNA, 20 nt, synthetic construct
  source 1..20: mol_type = other RNA
gctctgttgtaatcttatgg

SEQ ID NO: 8053 - RNA, 20 nt, synthetic construct
  source 1..20: mol_type = other RNA
tgtcacctcgcttagagacg

SEQ ID NO: 8054 - RNA, 20 nt, synthetic construct
  source 1..20: mol_type = other RNA
cttagagacgtcatagctgt

SEQ ID NO: 8055 - RNA, 20 nt, synthetic construct
  source 1..20: mol_type = other RNA
aagcgaggtgacaggagttt

SEQ ID NO: 8056 - RNA, 20 nt, synthetic construct
  source 1..20: mol_type = other RNA
gagcccaagccaagccatcg

SEQ ID NO: 8057 - RNA, 20 nt, synthetic construct
  source 1..20: mol_type = other RNA
gaggcctgacagctatgacg

SEQ ID NO: 8058 - RNA, 20 nt, synthetic construct
  source 1..20: mol_type = other RNA
aaaagcacctccactgagca

SEQ ID NO: 8059 - RNA, 20 nt, synthetic construct
  source 1..20: mol_type = other RNA
actgagcaccttgcgacccc

SEQ ID NO: 8060 - RNA, 20 nt, synthetic construct
  source 1..20: mol_type = other RNA
gtggaggtgctttttgagcc

SEQ ID NO: 8061 - RNA, 20 nt, synthetic construct
  source 1..20: mol_type = other RNA
tacccgccagagaacaaacc

SEQ ID NO: 8062 - RNA, 20 nt, synthetic construct
  source 1..20: mol_type = other RNA
ggcgggtaggagtgggggtc

SEQ ID NO: 8063 - RNA, 20 nt, synthetic construct
  source 1..20: mol_type = other RNA
cttcgctgactctctttttg

SEQ ID NO: 8064 - RNA, 20 nt, synthetic construct
  source 1..20: mol_type = other RNA
ctttttggactcagcccgcc

SEQ ID NO: 8065 - RNA, 20 nt, synthetic construct
  source 1..20: mol_type = other RNA
ttttggactcagcccgcctg

SEQ ID NO: 8066 - RNA, 20 nt, synthetic construct
  source 1..20: mol_type = other RNA
gcccgcctgcacccaggtga

SEQ ID NO: 8067 - RNA, 20 nt, synthetic construct
  source 1..20: mol_type = other RNA
cacaaagcctgtttggtggt

SEQ ID NO: 8068 - RNA, 20 nt, synthetic construct
  source 1..20: mol_type = other RNA
tcacacggatgcacatgtaa

SEQ ID NO: 8069 - RNA, 20 nt, synthetic construct
  source 1..20: mol_type = other RNA
gatcgggggacctcccttgg

SEQ ID NO: 8070 - RNA, 20 nt, synthetic construct
  source 1..20: mol_type = other RNA
cttgggagatcaatcccctg

SEQ ID NO: 8071 - RNA, 20 nt, synthetic construct
  source 1..20: mol_type = other RNA
caagggaggtcccccgatcc

SEQ ID NO: 8072 - RNA, 20 nt, synthetic construct
  source 1..20: mol_type = other RNA
tgctctttgctccatgagaa

SEQ ID NO: 8073 - RNA, 20 nt, synthetic construct
  source 1..20: mol_type = other RNA
ttgctccatgagaaagatcc

SEQ ID NO: 8074 - RNA, 20 nt, synthetic construct
  source 1..20: mol_type = other RNA
atgagaaagatccacctacg

SEQ ID NO: 8075 - RNA, 20 nt, synthetic construct
  source 1..20: mol_type = other RNA
tggagcaaagagcaggagga

SEQ ID NO: 8076 - RNA, 20 nt, synthetic construct
  source 1..20: mol_type = other RNA
ggtcctcagaccgaccagcc

SEQ ID NO: 8077 - RNA, 20 nt, synthetic construct
  source 1..20: mol_type = other RNA
gaccgaccagcccaagaaac

SEQ ID NO: 8078 - RNA, 20 nt, synthetic construct
  source 1..20: mol_type = other RNA
ccaatttcaagtccggtaag

SEQ ID NO: 8079 - RNA, 20 nt, synthetic construct
  source 1..20: mol_type = other RNA
ttttactctcttctccaacc

SEQ ID NO: 8080 - RNA, 20 nt, synthetic construct
  source 1..20: mol_type = other RNA
cttctccaacctccctcact

SEQ ID NO: 8081 - RNA, 20 nt, synthetic construct
  source 1..20: mol_type = other RNA
tctccaacctccctcactat

SEQ ID NO: 8082 - RNA, 20 nt, synthetic construct
  source 1..20: mol_type = other RNA
aacctccctcactatccctc

SEQ ID NO: 8083 - RNA, 20 nt, synthetic construct
  source 1..20: mol_type = other RNA
ctcactatccctcaacctct

SEQ ID NO: 8084 - RNA, 20 nt, synthetic construct
  source 1..20: mol_type = other RNA
ctatccctcaacctctttct

SEQ ID NO: 8085 - RNA, 20 nt, synthetic construct
  source 1..20: mol_type = other RNA
acctctttctcctttcaatc

SEQ ID NO: 8086 - RNA, 20 nt, synthetic construct
  source 1..20: mol_type = other RNA
ttctcctttcaatcttggcg

SEQ ID NO: 8087 - RNA, 20 nt, synthetic construct
  source 1..20: mol_type = other RNA
tttcaatcttggcgccacac

SEQ ID NO: 8088 - RNA, 20 nt, synthetic construct
  source 1..20: mol_type = other RNA
cccttctcttaatttcaatt

SEQ ID NO: 8089 - RNA, 20 nt, synthetic construct
  source 1..20: mol_type = other RNA
cttctcttaatttcaatttc

SEQ ID NO: 8090 - RNA, 20 nt, synthetic construct
  source 1..20: mol_type = other RNA
taatttcaatttctttcatt

SEQ ID NO: 8091 - RNA, 20 nt, synthetic construct
  source 1..20: mol_type = other RNA
accaaaaaatgaaagaaatt

SEQ ID NO: 8092 - RNA, 20 nt, synthetic construct
  source 1..20: mol_type = other RNA
tttgtctctaccaaaaaatg

SEQ ID NO: 8093 - RNA, 20 nt, synthetic construct
  source 1..20: mol_type = other RNA
ctgattatccactcacgttt

SEQ ID NO: 8094 - RNA, 20 nt, synthetic construct
  source 1..20: mol_type = other RNA
gattatccactcacgtttca

SEQ ID NO: 8095 - RNA, 20 nt, synthetic construct
  source 1..20: mol_type = other RNA
cgtttcaagggtgtcagacc

SEQ ID NO: 8096 - RNA, 20 nt, synthetic construct
  source 1..20: mol_type = other RNA
tatctctgtgccccaatccc

SEQ ID NO: 8097 - RNA, 20 nt, synthetic construct
  source 1..20: mol_type = other RNA
gtgccccaatcccttatttc

SEQ ID NO: 8098 - RNA, 20 nt, synthetic construct
  source 1..20: mol_type = other RNA
tatctctgtgccccaatccc

SEQ ID NO: 8099 - RNA, 20 nt, synthetic construct
  source 1..20: mol_type = other RNA
gtgccccaatcccttatttc

SEQ ID NO: 8100 - RNA, 20 nt, synthetic construct
  source 1..20: mol_type = other RNA
ctgcttttctggagggcaag

SEQ ID NO: 8101 - RNA, 20 nt, synthetic construct
  source 1..20: mol_type = other RNA
gcttttctggagggcaagaa

SEQ ID NO: 8102 - RNA, 20 nt, synthetic construct
  source 1..20: mol_type = other RNA
agaaaagcagagagggggtt

SEQ ID NO: 8103 - RNA, 20 nt, synthetic construct
  source 1..20: mol_type = other RNA
cctcctccgtgtctctacgc

SEQ ID NO: 8104 - RNA, 20 nt, synthetic construct
  source 1..20: mol_type = other RNA
tccgtgtctctacgctctct

SEQ ID NO: 8105 - RNA, 20 nt, synthetic construct
  source 1..20: mol_type = other RNA
gtgtctctacgctctctttt

SEQ ID NO: 8106 - RNA, 20 nt, synthetic construct
  source 1..20: mol_type = other RNA
acgctctcttttctcagggt

SEQ ID NO: 8107 - RNA, 20 nt, synthetic construct
  source 1..20: mol_type = other RNA
cttttctcagggtttgcctc

SEQ ID NO: 8108 - RNA, 20 nt, synthetic construct
  source 1..20: mol_type = other RNA
tttctcagggtttgcctcct

SEQ ID NO: 8109 - RNA, 20 nt, synthetic construct
  source 1..20: mol_type = other RNA
gggtttgcctccttcactat

SEQ ID NO: 8110 - RNA, 20 nt, synthetic construct
  source 1..20: mol_type = other RNA
ttcactatgggcaaccttcc

SEQ ID NO: 8111 - RNA, 20 nt, synthetic construct
  source 1..20: mol_type = other RNA
attcctccttcttctccttt

SEQ ID NO: 8112 - RNA, 20 nt, synthetic construct
  source 1..20: mol_type = other RNA
ttcttctcctttagcctgtg

SEQ ID NO: 8113 - RNA, 20 nt, synthetic construct
  source 1..20: mol_type = other RNA
tttagcctgtgtccttaaga

SEQ ID NO: 8114 - RNA, 20 nt, synthetic construct
  source 1..20: mol_type = other RNA
tcaactcacacctgacctaa

SEQ ID NO: 8115 - RNA, 20 nt, synthetic construct
  source 1..20: mol_type = other RNA
cacctgacctaaaacctaaa

SEQ ID NO: 8116 - RNA, 20 nt, synthetic construct
  source 1..20: mol_type = other RNA
gaccatttgcccatttttcg

SEQ ID NO: 8117 - RNA, 20 nt, synthetic construct
  source 1..20: mol_type = other RNA
ctagcctctgttcccaatgc

SEQ ID NO: 8118 - RNA, 20 nt, synthetic construct
  source 1..20: mol_type = other RNA
gttcccaatgcaattcctcc

SEQ ID NO: 8119 - RNA, 20 nt, synthetic construct
  source 1..20: mol_type = other RNA
cagatcctccttctttccct

SEQ ID NO: 8120 - RNA, 20 nt, synthetic construct
  source 1..20: mol_type = other RNA
ttctttccctcccgcctgtc

SEQ ID NO: 8121 - RNA, 20 nt, synthetic construct
  source 1..20: mol_type = other RNA
cgcctgtcccctcagtccca

SEQ ID NO: 8122 - RNA, 20 nt, synthetic construct
  source 1..20: mol_type = other RNA
gtcccaaccccaagcgtcgc

SEQ ID NO: 8123 - RNA, 20 nt, synthetic construct
  source 1..20: mol_type = other RNA
gcgacgcttggggttgggac

SEQ ID NO: 8124 - RNA, 20 nt, synthetic construct
  source 1..20: mol_type = other RNA
tccccaggctgctcatcacc

SEQ ID NO: 8125 - RNA, 20 nt, synthetic construct
  source 1..20: mol_type = other RNA
ccaggctgctcatcaccagg

SEQ ID NO: 8126 - RNA, 20 nt, synthetic construct
  source 1..20: mol_type = other RNA
tcaccaggccgagctaagtc

SEQ ID NO: 8127 - RNA, 20 nt, synthetic construct
  source 1..20: mol_type = other RNA
gcctggtgatgagcagcctg

SEQ ID NO: 8128 - RNA, 20 nt, synthetic construct
  source 1..20: mol_type = other RNA
gcctccgctcctccacccta

SEQ ID NO: 8129 - RNA, 20 nt, synthetic construct
  source 1..20: mol_type = other RNA
gctcctccaccctataatcc

SEQ ID NO: 8130 - RNA, 20 nt, synthetic construct
  source 1..20: mol_type = other RNA
tccaccctataatcctttta

SEQ ID NO: 8131 - RNA, 20 nt, synthetic construct
  source 1..20: mol_type = other RNA
accctataatccttttatca

SEQ ID NO: 8132 - RNA, 20 nt, synthetic construct
  source 1..20: mol_type = other RNA
cctcctcacacccgatccgg

SEQ ID NO: 8133 - RNA, 20 nt, synthetic construct
  source 1..20: mol_type = other RNA
tcacacccgatccggctcac

SEQ ID NO: 8134 - RNA, 20 nt, synthetic construct
  source 1..20: mol_type = other RNA
cacccgatccggctcacagt

SEQ ID NO: 8135 - RNA, 20 nt, synthetic construct
  source 1..20: mol_type = other RNA
cagtttcgttccgtgactgg

SEQ ID NO: 8136 - RNA, 20 nt, synthetic construct
  source 1..20: mol_type = other RNA
cccacctgcccagcaattta

SEQ ID NO: 8137 - RNA, 20 nt, synthetic construct
  source 1..20: mol_type = other RNA
taaaaaggtggatggagcca

SEQ ID NO: 8138 - RNA, 20 nt, synthetic construct
  source 1..20: mol_type = other RNA
atccacctttttaagagtaa

SEQ ID NO: 8139 - RNA, 20 nt, synthetic construct
  source 1..20: mol_type = other RNA
tttttctttatcccaaatca

SEQ ID NO: 8140 - RNA, 20 nt, synthetic construct
  source 1..20: mol_type = other RNA
ttttcatcaaatataaaaat

SEQ ID NO: 8141 - RNA, 20 nt, synthetic construct
  source 1..20: mol_type = other RNA
tttggcagcaaccctgagac

SEQ ID NO: 8142 - RNA, 20 nt, synthetic construct
  source 1..20: mol_type = other RNA
gggttgctgccaaacgagtc

SEQ ID NO: 8143 - RNA, 20 nt, synthetic construct
  source 1..20: mol_type = other RNA
atactcattttattacccaa

SEQ ID NO: 8144 - RNA, 20 nt, synthetic construct
  source 1..20: mol_type = other RNA
ttttattacccaatccactc

SEQ ID NO: 8145 - RNA, 20 nt, synthetic construct
  source 1..20: mol_type = other RNA
tgacattaaataaaactcca

SEQ ID NO: 8146 - RNA, 20 nt, synthetic construct
  source 1..20: mol_type = other RNA
aaaaattaaattccagccct

SEQ ID NO: 8147 - RNA, 20 nt, synthetic construct
  source 1..20: mol_type = other RNA
aacctcacaacaggatttaa

SEQ ID NO: 8148 - RNA, 20 nt, synthetic construct
  source 1..20: mol_type = other RNA
caacaggatttaattaacct

SEQ ID NO: 8149 - RNA, 20 nt, synthetic construct
  source 1..20: mol_type = other RNA
ccttcaaggtgtgcaataat

SEQ ID NO: 8150 - RNA, 20 nt, synthetic construct
  source 1..20: mol_type = other RNA
actgtgagacaaaccccagc

SEQ ID NO: 8151 - RNA, 20 nt, synthetic construct
  source 1..20: mol_type = other RNA
cagtggaggcaaggaattgc

SEQ ID NO: 8152 - RNA, 20 nt, synthetic construct
  source 1..20: mol_type = other RNA
agcacacaagaacttccaaa

SEQ ID NO: 8153 - RNA, 20 nt, synthetic construct
  source 1..20: mol_type = other RNA
agaacctcctcccccaggag

SEQ ID NO: 8154 - RNA, 20 nt, synthetic construct
  source 1..20: mol_type = other RNA
tcccccaggagtttgctaca

SEQ ID NO: 8155 - RNA, 20 nt, synthetic construct
  source 1..20: mol_type = other RNA
cccaggagtttgctacaagt

SEQ ID NO: 8156 - RNA, 20 nt, synthetic construct
  source 1..20: mol_type = other RNA
tgggggaggaggttctggag

SEQ ID NO: 8157 - RNA, 20 nt, synthetic construct
  source 1..20: mol_type = other RNA
taagccgcgtcccatctgtg

SEQ ID NO: 8158 - RNA, 20 nt, synthetic construct
  source 1..20: mol_type = other RNA
cctggcagccactcccagag

SEQ ID NO: 8159 - RNA, 20 nt, synthetic construct
  source 1..20: mol_type = other RNA
cagagcccctggaactctgg

SEQ ID NO: 8160 - RNA, 20 nt, synthetic construct
  source 1..20: mol_type = other RNA
gggagtggctgccaggtgag

SEQ ID NO: 8161 - RNA, 20 nt, synthetic construct
  source 1..20: mol_type = other RNA
ggcccaaggctctctgactg

SEQ ID NO: 8162 - RNA, 20 nt, synthetic construct
  source 1..20: mol_type = other RNA
ctgactgactccttcccaga

SEQ ID NO: 8163 - RNA, 20 nt, synthetic construct
  source 1..20: mol_type = other RNA
gactgactccttcccagatc

SEQ ID NO: 8164 - RNA, 20 nt, synthetic construct
  source 1..20: mol_type = other RNA
ttcccagatcttctcggctt

SEQ ID NO: 8165 - RNA, 20 nt, synthetic construct
  source 1..20: mol_type = other RNA
gcttagcggctgaagactga

SEQ ID NO: 8166 - RNA, 20 nt, synthetic construct
  source 1..20: mol_type = other RNA
gaagcccccagaccatcacg

SEQ ID NO: 8167 - RNA, 20 nt, synthetic construct
  source 1..20: mol_type = other RNA
gcgtccgtgatggtctgggg

SEQ ID NO: 8168 - RNA, 20 nt, synthetic construct
  source 1..20: mol_type = other RNA
cacagtggaaggtaagcccg

SEQ ID NO: 8169 - RNA, 20 nt, synthetic construct
  source 1..20: mol_type = other RNA
cagtggaaggtaagcccgtc

SEQ ID NO: 8170 - RNA, 20 nt, synthetic construct
  source 1..20: mol_type = other RNA
gtattgattaagaaggggac

SEQ ID NO: 8171 - RNA, 20 nt, synthetic construct
  source 1..20: mol_type = other RNA
ctccacattaccttcttttc

SEQ ID NO: 8172 - RNA, 20 nt, synthetic construct
  source 1..20: mol_type = other RNA
acattaccttcttttcaagg

SEQ ID NO: 8173 - RNA, 20 nt, synthetic construct
  source 1..20: mol_type = other RNA
ataactgttgtgggtattga

SEQ ID NO: 8174 - RNA, 20 nt, synthetic construct
  source 1..20: mol_type = other RNA
taaaactccccaactctggt

SEQ ID NO: 8175 - RNA, 20 nt, synthetic construct
  source 1..20: mol_type = other RNA
ccaactctggtgccaactta

SEQ ID NO: 8176 - RNA, 20 nt, synthetic construct
  source 1..20: mol_type = other RNA
ggtgccaacttagacaatac

SEQ ID NO: 8177 - RNA, 20 nt, synthetic construct
  source 1..20: mol_type = other RNA
tttaagcactcctttttagt

SEQ ID NO: 8178 - RNA, 20 nt, synthetic construct
  source 1..20: mol_type = other RNA
tttttagttatccccacctg

SEQ ID NO: 8179 - RNA, 20 nt, synthetic construct
  source 1..20: mol_type = other RNA
gcctaataagggaactgggc

SEQ ID NO: 8180 - RNA, 20 nt, synthetic construct
  source 1..20: mol_type = other RNA
ttgccgcccttcttcccaat

SEQ ID NO: 8181 - RNA, 20 nt, synthetic construct
  source 1..20: mol_type = other RNA
tttgtgtcctcctcttgtac

SEQ ID NO: 8182 - RNA, 20 nt, synthetic construct
  source 1..20: mol_type = other RNA
tcttgtaccccccaccttaa

SEQ ID NO: 8183 - RNA, 20 nt, synthetic construct
  source 1..20: mol_type = other RNA
tgtaccccccaccttaaccc

SEQ ID NO: 8184 - RNA, 20 nt, synthetic construct
  source 1..20: mol_type = other RNA
actccctccttggtggccaa

SEQ ID NO: 8185 - RNA, 20 nt, synthetic construct
  source 1..20: mol_type = other RNA
ctccttggtggccaatcatg

SEQ ID NO: 8186 - RNA, 20 nt, synthetic construct
  source 1..20: mol_type = other RNA
ttggtggccaatcatgcacc

SEQ ID NO: 8187 - RNA, 20 nt, synthetic construct
  source 1..20: mol_type = other RNA
ttaaaacctaatcaccctta

SEQ ID NO: 8188 - RNA, 20 nt, synthetic construct
  source 1..20: mol_type = other RNA
atgccaatatcccatcccgc

SEQ ID NO: 8189 - RNA, 20 nt, synthetic construct
  source 1..20: mol_type = other RNA
ccttacaattcccccatttt

SEQ ID NO: 8190 - RNA, 20 nt, synthetic construct
  source 1..20: mol_type = other RNA
ttacaattcccccattttac

SEQ ID NO: 8191 - RNA, 20 nt, synthetic construct
  source 1..20: mol_type = other RNA
cctatcctcaatacctgcct

SEQ ID NO: 8192 - RNA, 20 nt, synthetic construct
  source 1..20: mol_type = other RNA
tatcctcaatacctgcctct

SEQ ID NO: 8193 - RNA, 20 nt, synthetic construct
  source 1..20: mol_type = other RNA
atacctgcctctataaccca

SEQ ID NO: 8194 - RNA, 20 nt, synthetic construct
  source 1..20: mol_type = other RNA
ataacccattattctgttct

SEQ ID NO: 8195 - RNA, 20 nt, synthetic construct
  source 1..20: mol_type = other RNA
aacatgctttctttactatt

SEQ ID NO: 8196 - RNA, 20 nt, synthetic construct
  source 1..20: mol_type = other RNA
cttcactttcactttgactg

SEQ ID NO: 8197 - RNA, 20 nt, synthetic construct
  source 1..20: mol_type = other RNA
tcactttcactttgactgac

SEQ ID NO: 8198 - RNA, 20 nt, synthetic construct
  source 1..20: mol_type = other RNA
gcacattacctaggctgtac

SEQ ID NO: 8199 - RNA, 20 nt, synthetic construct
  source 1..20: mol_type = other RNA
tctgttacctatcttggcgt

SEQ ID NO: 8200 - RNA, 20 nt, synthetic construct
  source 1..20: mol_type = other RNA
taaaaacacatgtgctctcc

SEQ ID NO: 8201 - RNA, 20 nt, synthetic construct
  source 1..20: mol_type = other RNA
ccctgccaatcgtgtccgac

SEQ ID NO: 8202 - RNA, 20 nt, synthetic construct
  source 1..20: mol_type = other RNA
ctgccaatcgtgtccgactg

SEQ ID NO: 8203 - RNA, 20 nt, synthetic construct
  source 1..20: mol_type = other RNA
caaaccccagcaccttctac

SEQ ID NO: 8204 - RNA, 20 nt, synthetic construct
  source 1..20: mol_type = other RNA
aaccccagcaccttctacaa

SEQ ID NO: 8205 - RNA, 20 nt, synthetic construct
  source 1..20: mol_type = other RNA
tttccttcctaggcatggtt

SEQ ID NO: 8206 - RNA, 20 nt, synthetic construct
  source 1..20: mol_type = other RNA
tgtgtaagaattctgaccac

SEQ ID NO: 8207 - RNA, 20 nt, synthetic construct
  source 1..20: mol_type = other RNA
tgtctgcgtgcagcggctgc

SEQ ID NO: 8208 - RNA, 20 nt, synthetic construct
  source 1..20: mol_type = other RNA
aaaagtattaaagcagtggc

SEQ ID NO: 8209 - RNA, 20 nt, synthetic construct
  source 1..20: mol_type = other RNA
aaatcacaaactatgctcaa

SEQ ID NO: 8210 - RNA, 20 nt, synthetic construct
  source 1..20: mol_type = other RNA
actcactctctacatttctc

SEQ ID NO: 8211 - RNA, 20 nt, synthetic construct
  source 1..20: mol_type = other RNA
ctctctacatttctcataac

SEQ ID NO: 8212 - RNA, 20 nt, synthetic construct
  source 1..20: mol_type = other RNA
ctacatttctcataacttcc

SEQ ID NO: 8213 - RNA, 20 nt, synthetic construct
  source 1..20: mol_type = other RNA
acatttctcataacttccaa

SEQ ID NO: 8214 - RNA, 20 nt, synthetic construct
  source 1..20: mol_type = other RNA
taacttccaaaatctatttt

SEQ ID NO: 8215 - RNA, 20 nt, synthetic construct
  source 1..20: mol_type = other RNA
tacctgacacatatactttc

SEQ ID NO: 8216 - RNA, 20 nt, synthetic construct
  source 1..20: mol_type = other RNA
ttcagctgtactcactcttt

SEQ ID NO: 8217 - RNA, 20 nt, synthetic construct
  source 1..20: mol_type = other RNA
ctctttgttaactcccacaa

SEQ ID NO: 8218 - RNA, 20 nt, synthetic construct
  source 1..20: mol_type = other RNA
ttgttaactcccacaattac

SEQ ID NO: 8219 - RNA, 20 nt, synthetic construct
  source 1..20: mol_type = other RNA
cacaattaccgttgttcctg

SEQ ID NO: 8220 - RNA, 20 nt, synthetic construct
  source 1..20: mol_type = other RNA
atctggcctcccacattatt

SEQ ID NO: 8221 - RNA, 20 nt, synthetic construct
  source 1..20: mol_type = other RNA
cacattattcctgataccac

SEQ ID NO: 8222 - RNA, 20 nt, synthetic construct
  source 1..20: mol_type = other RNA
ctgatccacctgacattcac

SEQ ID NO: 8223 - RNA, 20 nt, synthetic construct
  source 1..20: mol_type = other RNA
gatccacctgacattcaccc

SEQ ID NO: 8224 - RNA, 20 nt, synthetic construct
  source 1..20: mol_type = other RNA
ccctgatcatgcttgattta

SEQ ID NO: 8225 - RNA, 20 nt, synthetic construct
  source 1..20: mol_type = other RNA
tagaacctctcatttccttt

SEQ ID NO: 8226 - RNA, 20 nt, synthetic construct
  source 1..20: mol_type = other RNA
catttcctttccatcatgga

SEQ ID NO: 8227 - RNA, 20 nt, synthetic construct
  source 1..20: mol_type = other RNA
tttcctttccatcatggaaa

SEQ ID NO: 8228 - RNA, 20 nt, synthetic construct
  source 1..20: mol_type = other RNA
aggaaataacttctcagtgt

SEQ ID NO: 8229 - RNA, 20 nt, synthetic construct
  source 1..20: mol_type = other RNA
gtgttccatctgctattcta

SEQ ID NO: 8230 - RNA, 20 nt, synthetic construct
  source 1..20: mol_type = other RNA
tcagggattattcaggaccc

SEQ ID NO: 8231 - RNA, 20 nt, synthetic construct
  source 1..20: mol_type = other RNA
gggattattcaggacccctc

SEQ ID NO: 8232 - RNA, 20 nt, synthetic construct
  source 1..20: mol_type = other RNA
cttccctacacatcaagctc

SEQ ID NO: 8233 - RNA, 20 nt, synthetic construct
  source 1..20: mol_type = other RNA
aggatttgccccacccagga

SEQ ID NO: 8234 - RNA, 20 nt, synthetic construct
  source 1..20: mol_type = other RNA
agcttgatgtgtagggaagg

SEQ ID NO: 8235 - RNA, 20 nt, synthetic construct
  source 1..20: mol_type = other RNA
acatgcctgagtcagataac

SEQ ID NO: 8236 - RNA, 20 nt, synthetic construct
  source 1..20: mol_type = other RNA
ggcatgttgagtaaagctaa

SEQ ID NO: 8237 - RNA, 20 nt, synthetic construct
  source 1..20: mol_type = other RNA
tagtctggaggtattttagt

SEQ ID NO: 8238 - RNA, 20 nt, synthetic construct
  source 1..20: mol_type = other RNA
agactaagaggtattttagt

SEQ ID NO: 8239 - RNA, 20 nt, synthetic construct
  source 1..20: mol_type = other RNA
gaccctgtaggaaaggccag

SEQ ID NO: 8240 - RNA, 20 nt, synthetic construct
  source 1..20: mol_type = other RNA
tcccttctgtcagacacaat

SEQ ID NO: 8241 - RNA, 20 nt, synthetic construct
  source 1..20: mol_type = other RNA
gtttagccttcccacctcaa

SEQ ID NO: 8242 - RNA, 20 nt, synthetic construct
  source 1..20: mol_type = other RNA
atacagtctgataacagatg

SEQ ID NO: 8243 - RNA, 20 nt, synthetic construct
  source 1..20: mol_type = other RNA
tctgttatcagactgtattg

SEQ ID NO: 8244 - RNA, 20 nt, synthetic construct
  source 1..20: mol_type = other RNA
tagtattcagtgaaaccttt

SEQ ID NO: 8245 - RNA, 20 nt, synthetic construct
  source 1..20: mol_type = other RNA
gtcttcaagaaaagtagaac

SEQ ID NO: 8246 - RNA, 20 nt, synthetic construct
  source 1..20: mol_type = other RNA
ccaagctcagccaccaaaaa

SEQ ID NO: 8247 - RNA, 20 nt, synthetic construct
  source 1..20: mol_type = other RNA
gccaccaaaaaggactggac

SEQ ID NO: 8248 - RNA, 20 nt, synthetic construct
  source 1..20: mol_type = other RNA
gaattcaggcctgtcctcgg

SEQ ID NO: 8249 - RNA, 20 nt, synthetic construct
  source 1..20: mol_type = other RNA
gaatgctacaaggtacagcc

SEQ ID NO: 8250 - RNA, 20 nt, synthetic construct
  source 1..20: mol_type = other RNA
tgtatagacgctccttttta

SEQ ID NO: 8251 - RNA, 20 nt, synthetic construct
  source 1..20: mol_type = other RNA
tttttattaggccccagtct

SEQ ID NO: 8252 - RNA, 20 nt, synthetic construct
  source 1..20: mol_type = other RNA
ttccagacaccagaccaact

SEQ ID NO: 8253 - RNA, 20 nt, synthetic construct
  source 1..20: mol_type = other RNA
tattcaccgttctcaactac

SEQ ID NO: 8254 - RNA, 20 nt, synthetic construct
  source 1..20: mol_type = other RNA
actactcatacatgccctgc

SEQ ID NO: 8255 - RNA, 20 nt, synthetic construct
  source 1..20: mol_type = other RNA
tacatgccctgctcttgttt

SEQ ID NO: 8256 - RNA, 20 nt, synthetic construct
  source 1..20: mol_type = other RNA
tgtttacactgccggtttac

SEQ ID NO: 8257 - RNA, 20 nt, synthetic construct
  source 1..20: mol_type = other RNA
aagccatcacagctgatatc

SEQ ID NO: 8258 - RNA, 20 nt, synthetic construct
  source 1..20: mol_type = other RNA
cggtggtatcccaaaactgc

SEQ ID NO: 8259 - RNA, 20 nt, synthetic construct
  source 1..20: mol_type = other RNA
taactcttgaagtaaataaa

SEQ ID NO: 8260 - RNA, 20 nt, synthetic construct
  source 1..20: mol_type = other RNA
tgaagtaaataaataatctt

SEQ ID NO: 8261 - RNA, 20 nt, synthetic construct
  source 1..20: mol_type = other RNA
ttaggcactctctaattaga

SEQ ID NO: 8262 - RNA, 20 nt, synthetic construct
  source 1..20: mol_type = other RNA
ctaattagatgtcctaggtc

SEQ ID NO: 8263 - RNA, 20 nt, synthetic construct
  source 1..20: mol_type = other RNA
aattagatgtcctaggtcct

SEQ ID NO: 8264 - RNA, 20 nt, synthetic construct
  source 1..20: mol_type = other RNA
caattcttagtccttttata

SEQ ID NO: 8265 - RNA, 20 nt, synthetic construct
  source 1..20: mol_type = other RNA
ttctcttattccatttagtt

SEQ ID NO: 8266 - RNA, 20 nt, synthetic construct
  source 1..20: mol_type = other RNA
tattccatttagtttttcaa

SEQ ID NO: 8267 - RNA, 20 nt, synthetic construct
  source 1..20: mol_type = other RNA
cttcagcttaatctctccca

SEQ ID NO: 8268 - RNA, 20 nt, synthetic construct
  source 1..20: mol_type = other RNA
cccattctaggttcccacgc

SEQ ID NO: 8269 - RNA, 20 nt, synthetic construct
  source 1..20: mol_type = other RNA
cattctaggttcccacgccg

SEQ ID NO: 8270 - RNA, 20 nt, synthetic construct
  source 1..20: mol_type = other RNA
gggctgcttcaagcgggatt

SEQ ID NO: 8271 - RNA, 20 nt, synthetic construct
  source 1..20: mol_type = other RNA
ctccataccaccccccaaaa

SEQ ID NO: 8272 - RNA, 20 nt, synthetic construct
  source 1..20: mol_type = other RNA
ccataccaccccccaaaaat

SEQ ID NO: 8273 - RNA, 20 nt, synthetic construct
  source 1..20: mol_type = other RNA
ataccaccccccaaaaattt

SEQ ID NO: 8274 - RNA, 20 nt, synthetic construct
  source 1..20: mol_type = other RNA
gagcccaagccacgccatcg

SEQ ID NO: 8275 - RNA, 20 nt, synthetic construct
  source 1..20: mol_type = other RNA
gaggcctgacattcctgcct

SEQ ID NO: 8276 - RNA, 20 nt, synthetic construct
  source 1..20: mol_type = other RNA
aaaagcacccccactgagca

SEQ ID NO: 8277 - RNA, 20 nt, synthetic construct
  source 1..20: mol_type = other RNA
gtgggggtgctttttgagcc

SEQ ID NO: 8278 - RNA, 20 nt, synthetic construct
  source 1..20: mol_type = other RNA
tgcccactgagcaccttgcg

SEQ ID NO: 8279 - RNA, 20 nt, synthetic construct
  source 1..20: mol_type = other RNA
gtgggcaggagtgggggtcg

SEQ ID NO: 8280 - RNA, 20 nt, synthetic construct
  source 1..20: mol_type = other RNA
tacccgccagataacaaacc

SEQ ID NO: 8281 - RNA, 20 nt, synthetic construct
  source 1..20: mol_type = other RNA
cttcgctgactctcttttcg

SEQ ID NO: 8282 - RNA, 20 nt, synthetic construct
  source 1..20: mol_type = other RNA
cttttcggactcagcccacc

SEQ ID NO: 8283 - RNA, 20 nt, synthetic construct
  source 1..20: mol_type = other RNA
tttcggactcagcccacctg

SEQ ID NO: 8284 - RNA, 20 nt, synthetic construct
  source 1..20: mol_type = other RNA
gcccacctgcacccaggtga

SEQ ID NO: 8285 - RNA, 20 nt, synthetic construct
  source 1..20: mol_type = other RNA
tcacacggacgcgcatgaaa

SEQ ID NO: 8286 - RNA, 20 nt, synthetic construct
  source 1..20: mol_type = other RNA
ccactcactcactgacaccc

SEQ ID NO: 8287 - RNA, 20 nt, synthetic construct
  source 1..20: mol_type = other RNA
ctcactgacacccagagcca

SEQ ID NO: 8288 - RNA, 20 nt, synthetic construct
  source 1..20: mol_type = other RNA
ctgacacccagagccacttc

SEQ ID NO: 8289 - RNA, 20 nt, synthetic construct
  source 1..20: mol_type = other RNA
gggtgtcagtgagtgagtgg

SEQ ID NO: 8290 - RNA, 20 nt, synthetic construct
  source 1..20: mol_type = other RNA
gttcatgctaagtgccctac

SEQ ID NO: 8291 - RNA, 20 nt, synthetic construct
  source 1..20: mol_type = other RNA
tttacattttatttttacta

SEQ ID NO: 8292 - RNA, 20 nt, synthetic construct
  source 1..20: mol_type = other RNA
aaaaaaaaaaaaaaaaaaaa

SEQ ID NO: 8293 - RNA, 20 nt, synthetic construct
  source 1..20: mol_type = other RNA
gtctcaaaaaaaaaaaaaaa

SEQ ID NO: 8294 - RNA, 20 nt, synthetic construct
  source 1..20: mol_type = other RNA
ctctgttgcccagggtggag

SEQ ID NO: 8295 - RNA, 20 nt, synthetic construct
  source 1..20: mol_type = other RNA
gttgcccagggtggagtgca

SEQ ID NO: 8296 - RNA, 20 nt, synthetic construct
  source 1..20: mol_type = other RNA
accctgggcaacagagtgag

SEQ ID NO: 8297 - RNA, 20 nt, synthetic construct
  source 1..20: mol_type = other RNA
gctcactgcaagctctgcct

SEQ ID NO: 8298 - RNA, 20 nt, synthetic construct
  source 1..20: mol_type = other RNA
ctgcaagctctgcctcccgg

SEQ ID NO: 8299 - RNA, 20 nt, synthetic construct
  source 1..20: mol_type = other RNA
gcctcccgggttcatgccat

SEQ ID NO: 8300 - RNA, 20 nt, synthetic construct
  source 1..20: mol_type = other RNA
cgggttcatgccattctcct

SEQ ID NO: 8301 - RNA, 20 nt, synthetic construct
  source 1..20: mol_type = other RNA
tgcctcagcctcccgagtag

SEQ ID NO: 8302 - RNA, 20 nt, synthetic construct
  source 1..20: mol_type = other RNA
gcctcccgagtagctgggac

SEQ ID NO: 8303 - RNA, 20 nt, synthetic construct
  source 1..20: mol_type = other RNA
cgagtagctgggactacagg

SEQ ID NO: 8304 - RNA, 20 nt, synthetic construct
  source 1..20: mol_type = other RNA
ggaggctgaggcaggagaat

SEQ ID NO: 8305 - RNA, 20 nt, synthetic construct
  source 1..20: mol_type = other RNA
atctcctgacctcgtgatcc

SEQ ID NO: 8306 - RNA, 20 nt, synthetic construct
  source 1..20: mol_type = other RNA
tgacctcgtgatccacccgc

SEQ ID NO: 8307 - RNA, 20 nt, synthetic construct
  source 1..20: mol_type = other RNA
tgatccacccgcctcggcct

SEQ ID NO: 8308 - RNA, 20 nt, synthetic construct
  source 1..20: mol_type = other RNA
gcctcccaaagtgctgggat

SEQ ID NO: 8309 - RNA, 20 nt, synthetic construct
  source 1..20: mol_type = other RNA
caaagtgctgggattacagg

SEQ ID NO: 8310 - RNA, 20 nt, synthetic construct
  source 1..20: mol_type = other RNA
cgcctgtaatcccagcactt

SEQ ID NO: 8311 - RNA, 20 nt, synthetic construct
  source 1..20: mol_type = other RNA
tagactacagacttgtacag

SEQ ID NO: 8312 - RNA, 20 nt, synthetic construct
  source 1..20: mol_type = other RNA
gtgtgtagtgggctacccca

SEQ ID NO: 8313 - RNA, 20 nt, synthetic construct
  source 1..20: mol_type = other RNA
ggctcatagccctttcacct

SEQ ID NO: 8314 - RNA, 20 nt, synthetic construct
  source 1..20: mol_type = other RNA
tagccctttcacctgctggg

SEQ ID NO: 8315 - RNA, 20 nt, synthetic construct
  source 1..20: mol_type = other RNA
agaaacacgctgaaatcccc

SEQ ID NO: 8316 - RNA, 20 nt, synthetic construct
  source 1..20: mol_type = other RNA
ctagaaacacgctgaaatcc

SEQ ID NO: 8317 - RNA, 20 nt, synthetic construct
  source 1..20: mol_type = other RNA
ggcacctcagtccttccacc

SEQ ID NO: 8318 - RNA, 20 nt, synthetic construct
  source 1..20: mol_type = other RNA
gtccttccacctccagagac

SEQ ID NO: 8319 - RNA, 20 nt, synthetic construct
  source 1..20: mol_type = other RNA
agagaccttgcctgcccctt

SEQ ID NO: 8320 - RNA, 20 nt, synthetic construct
  source 1..20: mol_type = other RNA
ggaggtggaaggactgaggt

SEQ ID NO: 8321 - RNA, 20 nt, synthetic construct
  source 1..20: mol_type = other RNA
tgcccttgtcactacgataa

SEQ ID NO: 8322 - RNA, 20 nt, synthetic construct
  source 1..20: mol_type = other RNA
tccagaacctccattccaaa

SEQ ID NO: 8323 - RNA, 20 nt, synthetic construct
  source 1..20: mol_type = other RNA
agaacctccattccaaacac

SEQ ID NO: 8324 - RNA, 20 nt, synthetic construct
  source 1..20: mol_type = other RNA
attccaaacacgccctttct

SEQ ID NO: 8325 - RNA, 20 nt, synthetic construct
  source 1..20: mol_type = other RNA
caactccaatattttcattg

SEQ ID NO: 8326 - RNA, 20 nt, synthetic construct
  source 1..20: mol_type = other RNA
aatattttcattgacgccag

SEQ ID NO: 8327 - RNA, 20 nt, synthetic construct
  source 1..20: mol_type = other RNA
cactcacctccttgcacatc

SEQ ID NO: 8328 - RNA, 20 nt, synthetic construct
  source 1..20: mol_type = other RNA
ctcacctccttgcacatctc

SEQ ID NO: 8329 - RNA, 20 nt, synthetic construct
  source 1..20: mol_type = other RNA
cctccttgcacatctcccct

SEQ ID NO: 8330 - RNA, 20 nt, synthetic construct
  source 1..20: mol_type = other RNA
ttgcacatctcccctcctcc

SEQ ID NO: 8331 - RNA, 20 nt, synthetic construct
  source 1..20: mol_type = other RNA
cctcctcccagcccagactt

SEQ ID NO: 8332 - RNA, 20 nt, synthetic construct
  source 1..20: mol_type = other RNA
tcccagcccagacttcatgg

SEQ ID NO: 8333 - RNA, 20 nt, synthetic construct
  source 1..20: mol_type = other RNA
cagcccagacttcatggtcc

SEQ ID NO: 8334 - RNA, 20 nt, synthetic construct
  source 1..20: mol_type = other RNA
ccacatcctcgtactagtta

SEQ ID NO: 8335 - RNA, 20 nt, synthetic construct
  source 1..20: mol_type = other RNA
tactagttattgtactcaca

SEQ ID NO: 8336 - RNA, 20 nt, synthetic construct
  source 1..20: mol_type = other RNA
cagaggagaaatcccactct

SEQ ID NO: 8337 - RNA, 20 nt, synthetic construct
  source 1..20: mol_type = other RNA
gtgagtacaataactagtac

SEQ ID NO: 8338 - RNA, 20 nt, synthetic construct
  source 1..20: mol_type = other RNA
tctgtgagtacaataactag

SEQ ID NO: 8339 - RNA, 20 nt, synthetic construct
  source 1..20: mol_type = other RNA
acttaaactcagccaccccc

SEQ ID NO: 8340 - RNA, 20 nt, synthetic construct
  source 1..20: mol_type = other RNA
gccacccccaaccccctgct

SEQ ID NO: 8341 - RNA, 20 nt, synthetic construct
  source 1..20: mol_type = other RNA
tgcacccaggcggctgagca

SEQ ID NO: 8342 - RNA, 20 nt, synthetic construct
  source 1..20: mol_type = other RNA
gccgcctgggtgcaggagca

SEQ ID NO: 8343 - RNA, 20 nt, synthetic construct
  source 1..20: mol_type = other RNA
ggctgtgctcagccgcctgg

SEQ ID NO: 8344 - RNA, 20 nt, synthetic construct
  source 1..20: mol_type = other RNA
ctggctgtgctcagccgcct

SEQ ID NO: 8345 - RNA, 20 nt, synthetic construct
  source 1..20: mol_type = other RNA
ctcacaaaccactcggctcc

SEQ ID NO: 8346 - RNA, 20 nt, synthetic construct
  source 1..20: mol_type = other RNA
caaaccactcggctcctgtg

SEQ ID NO: 8347 - RNA, 20 nt, synthetic construct
  source 1..20: mol_type = other RNA
gctcctgtgggccctggagg

SEQ ID NO: 8348 - RNA, 20 nt, synthetic construct
  source 1..20: mol_type = other RNA
tgtgggccctggaggcggtc

SEQ ID NO: 8349 - RNA, 20 nt, synthetic construct
  source 1..20: mol_type = other RNA
agggcccacaggagccgagt

SEQ ID NO: 8350 - RNA, 20 nt, synthetic construct
  source 1..20: mol_type = other RNA
gtttccaagtccatttctct

SEQ ID NO: 8351 - RNA, 20 nt, synthetic construct
  source 1..20: mol_type = other RNA
gcctgacttatttattttat

SEQ ID NO: 8352 - RNA, 20 nt, synthetic construct
  source 1..20: mol_type = other RNA
gtaaaagcgtatataatagt

SEQ ID NO: 8353 - RNA, 20 nt, synthetic construct
  source 1..20: mol_type = other RNA
gtgaggtacattctgtaact

SEQ ID NO: 8354 - RNA, 20 nt, synthetic construct
  source 1..20: mol_type = other RNA
cagagttgtttaaaaaatac

SEQ ID NO: 8355 - RNA, 20 nt, synthetic construct
  source 1..20: mol_type = other RNA
tcgtctgtgaaatggcaata

SEQ ID NO: 8356 - RNA, 20 nt, synthetic construct
  source 1..20: mol_type = other RNA
tcctgtgtgtctatctcttc

SEQ ID NO: 8357 - RNA, 20 nt, synthetic construct
  source 1..20: mol_type = other RNA
aggacaagtcacgcagtctc

SEQ ID NO: 8358 - RNA, 20 nt, synthetic construct
  source 1..20: mol_type = other RNA
tttctccttaaacccccaaa

SEQ ID NO: 8359 - RNA, 20 nt, synthetic construct
  source 1..20: mol_type = other RNA
ttaaacccccaaatccttct

SEQ ID NO: 8360 - RNA, 20 nt, synthetic construct
  source 1..20: mol_type = other RNA
cccagcctgccttatagttg

SEQ ID NO: 8361 - RNA, 20 nt, synthetic construct
  source 1..20: mol_type = other RNA
ttggaataggaagcaaggca

SEQ ID NO: 8362 - RNA, 20 nt, synthetic construct
  source 1..20: mol_type = other RNA
ataaagagagaacctccaat

SEQ ID NO: 8363 - RNA, 20 nt, synthetic construct
  source 1..20: mol_type = other RNA
ttattgagtctattttctca

SEQ ID NO: 8364 - RNA, 20 nt, synthetic construct
  source 1..20: mol_type = other RNA
ctttattgagtctattttct

SEQ ID NO: 8365 - RNA, 20 nt, synthetic construct
  source 1..20: mol_type = other RNA
aatggctcccccctccacat

SEQ ID NO: 8366 - RNA, 20 nt, synthetic construct
  source 1..20: mol_type = other RNA
cccctccacatcatctccct

SEQ ID NO: 8367 - RNA, 20 nt, synthetic construct
  source 1..20: mol_type = other RNA
acatcatctccctacctgcc

SEQ ID NO: 8368 - RNA, 20 nt, synthetic construct
  source 1..20: mol_type = other RNA
ctacctgcctgcctgtgcct

SEQ ID NO: 8369 - RNA, 20 nt, synthetic construct
  source 1..20: mol_type = other RNA
ttttccaccttcccctgtga

SEQ ID NO: 8370 - RNA, 20 nt, synthetic construct
  source 1..20: mol_type = other RNA
agacaagggtgcagccataa

SEQ ID NO: 8371 - RNA, 20 nt, synthetic construct
  source 1..20: mol_type = other RNA
atcctctagacaagggtgca

SEQ ID NO: 8372 - RNA, 20 nt, synthetic construct
  source 1..20: mol_type = other RNA
cctcctaagagatgctccct

SEQ ID NO: 8373 - RNA, 20 nt, synthetic construct
  source 1..20: mol_type = other RNA
taagagatgctccctactct

SEQ ID NO: 8374 - RNA, 20 nt, synthetic construct
  source 1..20: mol_type = other RNA
taggaggtgagaagggatgg

SEQ ID NO: 8375 - RNA, 20 nt, synthetic construct
  source 1..20: mol_type = other RNA
ctactctccagcattgccag

SEQ ID NO: 8376 - RNA, 20 nt, synthetic construct
  source 1..20: mol_type = other RNA
ccagcattgccagcttctct

SEQ ID NO: 8377 - RNA, 20 nt, synthetic construct
  source 1..20: mol_type = other RNA
agcattgccagcttctctgt

SEQ ID NO: 8378 - RNA, 20 nt, synthetic construct
  source 1..20: mol_type = other RNA
gtctcaactgtaacacttcc

SEQ ID NO: 8379 - RNA, 20 nt, synthetic construct
  source 1..20: mol_type = other RNA
actgtaacacttccatcagc

SEQ ID NO: 8380 - RNA, 20 nt, synthetic construct
  source 1..20: mol_type = other RNA
gggccatcatccatcttcct

SEQ ID NO: 8381 - RNA, 20 nt, synthetic construct
  source 1..20: mol_type = other RNA
tcttcctgcattgtctctac

SEQ ID NO: 8382 - RNA, 20 nt, synthetic construct
  source 1..20: mol_type = other RNA
tcctgcattgtctctacaca

SEQ ID NO: 8383 - RNA, 20 nt, synthetic construct
  source 1..20: mol_type = other RNA
acacaggccttcctggtgat

SEQ ID NO: 8384 - RNA, 20 nt, synthetic construct
  source 1..20: mol_type = other RNA
acatggctaaatcagaacac

SEQ ID NO: 8385 - RNA, 20 nt, synthetic construct
  source 1..20: mol_type = other RNA
ccttgcttgtcccgtgggcc

SEQ ID NO: 8386 - RNA, 20 nt, synthetic construct
  source 1..20: mol_type = other RNA
tttgacccagttggtcactt

SEQ ID NO: 8387 - RNA, 20 nt, synthetic construct
  source 1..20: mol_type = other RNA
tcctggacatgctccctcgt

SEQ ID NO: 8388 - RNA, 20 nt, synthetic construct
  source 1..20: mol_type = other RNA
tggacatgctccctcgtgat

SEQ ID NO: 8389 - RNA, 20 nt, synthetic construct
  source 1..20: mol_type = other RNA
ctcgtgatctctgtgagtcc

SEQ ID NO: 8390 - RNA, 20 nt, synthetic construct
  source 1..20: mol_type = other RNA
tgatctctgtgagtcccctg

SEQ ID NO: 8391 - RNA, 20 nt, synthetic construct
  source 1..20: mol_type = other RNA
gtgagtcccctgtcattgaa

SEQ ID NO: 8392 - RNA, 20 nt, synthetic construct
  source 1..20: mol_type = other RNA
cagagatcacgagggagcat

SEQ ID NO: 8393 - RNA, 20 nt, synthetic construct
  source 1..20: mol_type = other RNA
cctaagttccatgtgacacc

SEQ ID NO: 8394 - RNA, 20 nt, synthetic construct
  source 1..20: mol_type = other RNA
aacccatgcacccagaactc

SEQ ID NO: 8395 - RNA, 20 nt, synthetic construct
  source 1..20: mol_type = other RNA
tcagttctccactaagccac

SEQ ID NO: 8396 - RNA, 20 nt, synthetic construct
  source 1..20: mol_type = other RNA
gttctccactaagccactcc

SEQ ID NO: 8397 - RNA, 20 nt, synthetic construct
  source 1..20: mol_type = other RNA
actaagccactcctctctgg

SEQ ID NO: 8398 - RNA, 20 nt, synthetic construct
  source 1..20: mol_type = other RNA
tctctgggctccccagctgc

SEQ ID NO: 8399 - RNA, 20 nt, synthetic construct
  source 1..20: mol_type = other RNA
ctgggctccccagctgctcc

SEQ ID NO: 8400 - RNA, 20 nt, synthetic construct
  source 1..20: mol_type = other RNA
gggctccccagctgctcctt

SEQ ID NO: 8401 - RNA, 20 nt, synthetic construct
  source 1..20: mol_type = other RNA
ccagctgctccttaagtgac

SEQ ID NO: 8402 - RNA, 20 nt, synthetic construct
  source 1..20: mol_type = other RNA
ttaagtgacaaggccaaaac

SEQ ID NO: 8403 - RNA, 20 nt, synthetic construct
  source 1..20: mol_type = other RNA
cacatctcatctgtggacaa

SEQ ID NO: 8404 - RNA, 20 nt, synthetic construct
  source 1..20: mol_type = other RNA
catctcatctgtggacaaat

SEQ ID NO: 8405 - RNA, 20 nt, synthetic construct
  source 1..20: mol_type = other RNA
tctgtggacaaatacaaata

SEQ ID NO: 8406 - RNA, 20 nt, synthetic construct
  source 1..20: mol_type = other RNA
gagtcccactgctgcctctg

SEQ ID NO: 8407 - RNA, 20 nt, synthetic construct
  source 1..20: mol_type = other RNA
gagtgtatttgtatttgtcc

SEQ ID NO: 8408 - RNA, 20 nt, synthetic construct
  source 1..20: mol_type = other RNA
gatctaagccactaccagtg

SEQ ID NO: 8409 - RNA, 20 nt, synthetic construct
  source 1..20: mol_type = other RNA
cagtctcccacctgctctct

SEQ ID NO: 8410 - RNA, 20 nt, synthetic construct
  source 1..20: mol_type = other RNA
cacctgctctctctgctttt

SEQ ID NO: 8411 - RNA, 20 nt, synthetic construct
  source 1..20: mol_type = other RNA
ctctgcttttaccctggtca

SEQ ID NO: 8412 - RNA, 20 nt, synthetic construct
  source 1..20: mol_type = other RNA
ctgcttttaccctggtcacc

SEQ ID NO: 8413 - RNA, 20 nt, synthetic construct
  source 1..20: mol_type = other RNA
gcttttaccctggtcaccga

SEQ ID NO: 8414 - RNA, 20 nt, synthetic construct
  source 1..20: mol_type = other RNA
cagcaatcctcaaaaattat

SEQ ID NO: 8415 - RNA, 20 nt, synthetic construct
  source 1..20: mol_type = other RNA
aaaattataaatcagatcat

SEQ ID NO: 8416 - RNA, 20 nt, synthetic construct
  source 1..20: mol_type = other RNA
gatatggtttcgctgtgtcc

SEQ ID NO: 8417 - RNA, 20 nt, synthetic construct
  source 1..20: mol_type = other RNA
gcttgaattgtatttcccag

SEQ ID NO: 8418 - RNA, 20 nt, synthetic construct
  source 1..20: mol_type = other RNA
cacaacacgtgggaattctg

SEQ ID NO: 8419 - RNA, 20 nt, synthetic construct
  source 1..20: mol_type = other RNA
ccctgggtccctcccacaac

SEQ ID NO: 8420 - RNA, 20 nt, synthetic construct
  source 1..20: mol_type = other RNA
tggtagtgaataagtctcag

SEQ ID NO: 8421 - RNA, 20 nt, synthetic construct
  source 1..20: mol_type = other RNA
ggagatctgatgggtttatc

SEQ ID NO: 8422 - RNA, 20 nt, synthetic construct
  source 1..20: mol_type = other RNA
tgagacttattcactaccat

SEQ ID NO: 8423 - RNA, 20 nt, synthetic construct
  source 1..20: mol_type = other RNA
tcattttctcttgcctccgc

SEQ ID NO: 8424 - RNA, 20 nt, synthetic construct
  source 1..20: mol_type = other RNA
ttttctcttgcctccgccat

SEQ ID NO: 8425 - RNA, 20 nt, synthetic construct
  source 1..20: mol_type = other RNA
tgcctccgccatgtaagaag

SEQ ID NO: 8426 - RNA, 20 nt, synthetic construct
  source 1..20: mol_type = other RNA
gccatgtaagaagtgccttt

SEQ ID NO: 8427 - RNA, 20 nt, synthetic construct
  source 1..20: mol_type = other RNA
gaatcatgacgggaaacgaa

SEQ ID NO: 8428 - RNA, 20 nt, synthetic construct
  source 1..20: mol_type = other RNA
gcagccacgtggaactataa

SEQ ID NO: 8429 - RNA, 20 nt, synthetic construct
  source 1..20: mol_type = other RNA
ggtatgtctttatcagcagc

SEQ ID NO: 8430 - RNA, 20 nt, synthetic construct
  source 1..20: mol_type = other RNA
gtaccaatttactggattag

SEQ ID NO: 8431 - RNA, 20 nt, synthetic construct
  source 1..20: mol_type = other RNA
cagtaccaatttactggatt

SEQ ID NO: 8432 - RNA, 20 nt, synthetic construct
  source 1..20: mol_type = other RNA
aaactgttccaaattctgcc

SEQ ID NO: 8433 - RNA, 20 nt, synthetic construct
  source 1..20: mol_type = other RNA
gaagaagacaggaaaatgtg

SEQ ID NO: 8434 - RNA, 20 nt, synthetic construct
  source 1..20: mol_type = other RNA
cattttcctgtcttcttctg

SEQ ID NO: 8435 - RNA, 20 nt, synthetic construct
  source 1..20: mol_type = other RNA
aggaagttccaaactttctc

SEQ ID NO: 8436 - RNA, 20 nt, synthetic construct
  source 1..20: mol_type = other RNA
tagtgatatgaacaataagg

SEQ ID NO: 8437 - RNA, 20 nt, synthetic construct
  source 1..20: mol_type = other RNA
ccttgggccttattgttcat

SEQ ID NO: 8438 - RNA, 20 nt, synthetic construct
  source 1..20: mol_type = other RNA
gagggggcagatgaggaact

SEQ ID NO: 8439 - RNA, 20 nt, synthetic construct
  source 1..20: mol_type = other RNA
gagaccacctcaccttgggc

SEQ ID NO: 8440 - RNA, 20 nt, synthetic construct
  source 1..20: mol_type = other RNA
tctgccccctctgagaccac

SEQ ID NO: 8441 - RNA, 20 nt, synthetic construct
  source 1..20: mol_type = other RNA
agttcccaacaagttcctca

SEQ ID NO: 8442 - RNA, 20 nt, synthetic construct
  source 1..20: mol_type = other RNA
tgttatgttttagcaaagag

SEQ ID NO: 8443 - RNA, 20 nt, synthetic construct
  source 1..20: mol_type = other RNA
ttgctaaaacataacaggag

SEQ ID NO: 8444 - RNA, 20 nt, synthetic construct
  source 1..20: mol_type = other RNA
agggcaggggcaaaatgttg

SEQ ID NO: 8445 - RNA, 20 nt, synthetic construct
  source 1..20: mol_type = other RNA
agttcgacgttccgcaaatc

SEQ ID NO: 8446 - RNA, 20 nt, synthetic construct
  source 1..20: mol_type = other RNA
caagttcgacgttccgcaaa

SEQ ID NO: 8447 - RNA, 20 nt, synthetic construct
  source 1..20: mol_type = other RNA
ctcaagttcgacgttccgca

SEQ ID NO: 8448 - RNA, 20 nt, synthetic construct
  source 1..20: mol_type = other RNA
tgaatgctttgctgcttaga

SEQ ID NO: 8449 - RNA, 20 nt, synthetic construct
  source 1..20: mol_type = other RNA
gcttcccgttcaaaacagaa

SEQ ID NO: 8450 - RNA, 20 nt, synthetic construct
  source 1..20: mol_type = other RNA
aaaaatgggtttttcttttc

SEQ ID NO: 8451 - RNA, 20 nt, synthetic construct
  source 1..20: mol_type = other RNA
tcaaaaaatgggtttttctt

SEQ ID NO: 8452 - RNA, 20 nt, synthetic construct
  source 1..20: mol_type = other RNA
ttgctacttaggcaaatttc

SEQ ID NO: 8453 - RNA, 20 nt, synthetic construct
  source 1..20: mol_type = other RNA
aaaccatggagaaaatgtct

SEQ ID NO: 8454 - RNA, 20 nt, synthetic construct
  source 1..20: mol_type = other RNA
atggttttgaggattaacac

SEQ ID NO: 8455 - RNA, 20 nt, synthetic construct
  source 1..20: mol_type = other RNA
aggccatgtcagggaccttc

SEQ ID NO: 8456 - RNA, 20 nt, synthetic construct
  source 1..20: mol_type = other RNA
tcccatcacaggcctagagc

SEQ ID NO: 8457 - RNA, 20 nt, synthetic construct
  source 1..20: mol_type = other RNA
catcacaggcctagagcccc

SEQ ID NO: 8458 - RNA, 20 nt, synthetic construct
  source 1..20: mol_type = other RNA
aggcctgtgatgggaggagc

SEQ ID NO: 8459 - RNA, 20 nt, synthetic construct
  source 1..20: mol_type = other RNA
tggggctctaggcctgtgat

SEQ ID NO: 8460 - RNA, 20 nt, synthetic construct
  source 1..20: mol_type = other RNA
gtgtcccagctgctccaggc

SEQ ID NO: 8461 - RNA, 20 nt, synthetic construct
  source 1..20: mol_type = other RNA
aggcatggctgaaaggggtc

SEQ ID NO: 8462 - RNA, 20 nt, synthetic construct
  source 1..20: mol_type = other RNA
gaagccacagcccaagctgt

SEQ ID NO: 8463 - RNA, 20 nt, synthetic construct
  source 1..20: mol_type = other RNA
acaccacatagaagttgcca

SEQ ID NO: 8464 - RNA, 20 nt, synthetic construct
  source 1..20: mol_type = other RNA
attcttgacttctgtgcacc

SEQ ID NO: 8465 - RNA, 20 nt, synthetic construct
  source 1..20: mol_type = other RNA
acctagatttcagaagacgt

SEQ ID NO: 8466 - RNA, 20 nt, synthetic construct
  source 1..20: mol_type = other RNA
tggagaacctctggtaggac

SEQ ID NO: 8467 - RNA, 20 nt, synthetic construct
  source 1..20: mol_type = other RNA
atgagcaccccaccctgaag

SEQ ID NO: 8468 - RNA, 20 nt, synthetic construct
  source 1..20: mol_type = other RNA
ggtaggacagtgcagaaggg

SEQ ID NO: 8469 - RNA, 20 nt, synthetic construct
  source 1..20: mol_type = other RNA
actaggcaatgccccagtag

SEQ ID NO: 8470 - RNA, 20 nt, synthetic construct
  source 1..20: mol_type = other RNA
gctccactaggcaatgcccc

SEQ ID NO: 8471 - RNA, 20 nt, synthetic construct
  source 1..20: mol_type = other RNA
actcagctccactaggcaat

SEQ ID NO: 8472 - RNA, 20 nt, synthetic construct
  source 1..20: mol_type = other RNA
agaccccagaatggtagatc

SEQ ID NO: 8473 - RNA, 20 nt, synthetic construct
  source 1..20: mol_type = other RNA
tggaaaatctgcagacaatc

SEQ ID NO: 8474 - RNA, 20 nt, synthetic construct
  source 1..20: mol_type = other RNA
caacagctttcatgggctgg

SEQ ID NO: 8475 - RNA, 20 nt, synthetic construct
  source 1..20: mol_type = other RNA
ctcccaacagctttcatggg

SEQ ID NO: 8476 - RNA, 20 nt, synthetic construct
  source 1..20: mol_type = other RNA
gcccctgtgactttgcaggg

SEQ ID NO: 8477 - RNA, 20 nt, synthetic construct
  source 1..20: mol_type = other RNA
tgcatcagcgtgacctggat

SEQ ID NO: 8478 - RNA, 20 nt, synthetic construct
  source 1..20: mol_type = other RNA
catccaggtcacgctgatgc

SEQ ID NO: 8479 - RNA, 20 nt, synthetic construct
  source 1..20: mol_type = other RNA
acatctcacatccaggtcac

SEQ ID NO: 8480 - RNA, 20 nt, synthetic construct
  source 1..20: mol_type = other RNA
tttgactccacatctcacat

SEQ ID NO: 8481 - RNA, 20 nt, synthetic construct
  source 1..20: mol_type = other RNA
aaaatgatctcctttgactc

SEQ ID NO: 8482 - RNA, 20 nt, synthetic construct
  source 1..20: mol_type = other RNA
catttggaatggctgtattt

SEQ ID NO: 8483 - RNA, 20 nt, synthetic construct
  source 1..20: mol_type = other RNA
taggtggaagggacttgcct

SEQ ID NO: 8484 - RNA, 20 nt, synthetic construct
  source 1..20: mol_type = other RNA
gatgagactttggactgtgg

SEQ ID NO: 8485 - RNA, 20 nt, synthetic construct
  source 1..20: mol_type = other RNA
tctgagacaaggcaagtccc

SEQ ID NO: 8486 - RNA, 20 nt, synthetic construct
  source 1..20: mol_type = other RNA
tttcagcattgacccaaaag

SEQ ID NO: 8487 - RNA, 20 nt, synthetic construct
  source 1..20: mol_type = other RNA
aagttttaactcatttcagc

SEQ ID NO: 8488 - RNA, 20 nt, synthetic construct
  source 1..20: mol_type = other RNA
caaagttttaactcatttca

SEQ ID NO: 8489 - RNA, 20 nt, synthetic construct
  source 1..20: mol_type = other RNA
catttcaaaaccaatcatgc

SEQ ID NO: 8490 - RNA, 20 nt, synthetic construct
  source 1..20: mol_type = other RNA
aaatttcatgtcctcacatt

SEQ ID NO: 8491 - RNA, 20 nt, synthetic construct
  source 1..20: mol_type = other RNA
cagcttgaattgtgtctccc

SEQ ID NO: 8492 - RNA, 20 nt, synthetic construct
  source 1..20: mol_type = other RNA
cagaattcccacatgttgtg

SEQ ID NO: 8493 - RNA, 20 nt, synthetic construct
  source 1..20: mol_type = other RNA
cacaacatgtgggaattctg

SEQ ID NO: 8494 - RNA, 20 nt, synthetic construct
  source 1..20: mol_type = other RNA
ctcccacaacatgtgggaat

SEQ ID NO: 8495 - RNA, 20 nt, synthetic construct
  source 1..20: mol_type = other RNA
ctggctccctcccacaacat

SEQ ID NO: 8496 - RNA, 20 nt, synthetic construct
  source 1..20: mol_type = other RNA
ccctggctccctcccacaac

SEQ ID NO: 8497 - RNA, 20 nt, synthetic construct
  source 1..20: mol_type = other RNA
tgatagtgaataagtctcat

SEQ ID NO: 8498 - RNA, 20 nt, synthetic construct
  source 1..20: mol_type = other RNA
taggatctgatgggattatc

SEQ ID NO: 8499 - RNA, 20 nt, synthetic construct
  source 1..20: mol_type = other RNA
tgctgttgccatgtaagaag

SEQ ID NO: 8500 - RNA, 20 nt, synthetic construct
  source 1..20: mol_type = other RNA
tgccgtgattctgaggcctg

SEQ ID NO: 8501 - RNA, 20 nt, synthetic construct
  source 1..20: mol_type = other RNA
gaatcacggcaggaggcgaa

SEQ ID NO: 8502 - RNA, 20 nt, synthetic construct
  source 1..20: mol_type = other RNA
ttttcttcccagtcttgggt

SEQ ID NO: 8503 - RNA, 20 nt, synthetic construct
  source 1..20: mol_type = other RNA
tctgcttaaaacctgccctt

SEQ ID NO: 8504 - RNA, 20 nt, synthetic construct
  source 1..20: mol_type = other RNA
gcttaaaacctgcccttagc

SEQ ID NO: 8505 - RNA, 20 nt, synthetic construct
  source 1..20: mol_type = other RNA
ccaccttcccggagaaaagc

SEQ ID NO: 8506 - RNA, 20 nt, synthetic construct
  source 1..20: mol_type = other RNA
accttcccggagaaaagcca

SEQ ID NO: 8507 - RNA, 20 nt, synthetic construct
  source 1..20: mol_type = other RNA
gggaaggtggagagctaagg

SEQ ID NO: 8508 - RNA, 20 nt, synthetic construct
  source 1..20: mol_type = other RNA
ggcttttctccgggaaggtg

SEQ ID NO: 8509 - RNA, 20 nt, synthetic construct
  source 1..20: mol_type = other RNA
ccaaccattctggggactct

SEQ ID NO: 8510 - RNA, 20 nt, synthetic construct
  source 1..20: mol_type = other RNA
cccaggtctgcccccacacc

SEQ ID NO: 8511 - RNA, 20 nt, synthetic construct
  source 1..20: mol_type = other RNA
agcccagctcttccttgcag

SEQ ID NO: 8512 - RNA, 20 nt, synthetic construct
  source 1..20: mol_type = other RNA
tccttgcaggctccttccca

SEQ ID NO: 8513 - RNA, 20 nt, synthetic construct
  source 1..20: mol_type = other RNA
ttcccatctctgggctgttc

SEQ ID NO: 8514 - RNA, 20 nt, synthetic construct
  source 1..20: mol_type = other RNA
gggctgttccagtctggggc

SEQ ID NO: 8515 - RNA, 20 nt, synthetic construct
  source 1..20: mol_type = other RNA
actgtgtccacggcccgtcc

SEQ ID NO: 8516 - RNA, 20 nt, synthetic construct
  source 1..20: mol_type = other RNA
cagctcctttcctccagtgt

SEQ ID NO: 8517 - RNA, 20 nt, synthetic construct
  source 1..20: mol_type = other RNA
gctcctttcctccagtgttc

SEQ ID NO: 8518 - RNA, 20 nt, synthetic construct
  source 1..20: mol_type = other RNA
tttcctccagtgttctcttt

SEQ ID NO: 8519 - RNA, 20 nt, synthetic construct
  source 1..20: mol_type = other RNA
agtgttctctttgcacaccg

SEQ ID NO: 8520 - RNA, 20 nt, synthetic construct
  source 1..20: mol_type = other RNA
ttgcacaccgccctgtttta

SEQ ID NO: 8521 - RNA, 20 nt, synthetic construct
  source 1..20: mol_type = other RNA
caccctcttctcttttcctt

SEQ ID NO: 8522 - RNA, 20 nt, synthetic construct
  source 1..20: mol_type = other RNA
tctcttttccttttcctcca

SEQ ID NO: 8523 - RNA, 20 nt, synthetic construct
  source 1..20: mol_type = other RNA
tttccttttcctccatggca

SEQ ID NO: 8524 - RNA, 20 nt, synthetic construct
  source 1..20: mol_type = other RNA
atggcactcatcaccatctc

SEQ ID NO: 8525 - RNA, 20 nt, synthetic construct
  source 1..20: mol_type = other RNA
tcaccatctcacacagtaca

SEQ ID NO: 8526 - RNA, 20 nt, synthetic construct
  source 1..20: mol_type = other RNA
cacagtacatgtttgatttg

SEQ ID NO: 8527 - RNA, 20 nt, synthetic construct
  source 1..20: mol_type = other RNA
agtagggcggaacagacgac

SEQ ID NO: 8528 - RNA, 20 nt, synthetic construct
  source 1..20: mol_type = other RNA
ctctagtagggcggaacaga

SEQ ID NO: 8529 - RNA, 20 nt, synthetic construct
  source 1..20: mol_type = other RNA
gtcattaaacatacatgtca

SEQ ID NO: 8530 - RNA, 20 nt, synthetic construct
  source 1..20: mol_type = other RNA
agcttggtgctagggatgcc

SEQ ID NO: 8531 - RNA, 20 nt, synthetic construct
  source 1..20: mol_type = other RNA
ggcaggttccctgcttatac

SEQ ID NO: 8532 - RNA, 20 nt, synthetic construct
  source 1..20: mol_type = other RNA
gtataagcagggaacctgcc

SEQ ID NO: 8533 - RNA, 20 nt, synthetic construct
  source 1..20: mol_type = other RNA
ctgacaggtttgcaggcagc

SEQ ID NO: 8534 - RNA, 20 nt, synthetic construct
  source 1..20: mol_type = other RNA
gacaggtttgcaggcagccc

SEQ ID NO: 8535 - RNA, 20 nt, synthetic construct
  source 1..20: mol_type = other RNA
catgtgcagtaggggctaca

SEQ ID NO: 8536 - RNA, 20 nt, synthetic construct
  source 1..20: mol_type = other RNA
caagtagagagttgcagccc

SEQ ID NO: 8537 - RNA, 20 nt, synthetic construct
  source 1..20: mol_type = other RNA
agtagagagttgcagccctg

SEQ ID NO: 8538 - RNA, 20 nt, synthetic construct
  source 1..20: mol_type = other RNA
acttgagagcatttcctccc

SEQ ID NO: 8539 - RNA, 20 nt, synthetic construct
  source 1..20: mol_type = other RNA
ctacttgagagcatttcctc

SEQ ID NO: 8540 - RNA, 20 nt, synthetic construct
  source 1..20: mol_type = other RNA
ccgacctcaggagggagagc

SEQ ID NO: 8541 - RNA, 20 nt, synthetic construct
  source 1..20: mol_type = other RNA
ggagggagagccctgagctc

SEQ ID NO: 8542 - RNA, 20 nt, synthetic construct
  source 1..20: mol_type = other RNA
tgaggtcggggagacagggc

SEQ ID NO: 8543 - RNA, 20 nt, synthetic construct
  source 1..20: mol_type = other RNA
ctcctgaggtcggggagaca

SEQ ID NO: 8544 - RNA, 20 nt, synthetic construct
  source 1..20: mol_type = other RNA
ccctcctgaggtcggggaga

SEQ ID NO: 8545 - RNA, 20 nt, synthetic construct
  source 1..20: mol_type = other RNA
gggctctccctcctgaggtc

SEQ ID NO: 8546 - RNA, 20 nt, synthetic construct
  source 1..20: mol_type = other RNA
aacccttgccctctggggct

SEQ ID NO: 8547 - RNA, 20 nt, synthetic construct
  source 1..20: mol_type = other RNA
ggggctatgggaaacagctg

SEQ ID NO: 8548 - RNA, 20 nt, synthetic construct
  source 1..20: mol_type = other RNA
ctttccagctgtttcccata

SEQ ID NO: 8549 - RNA, 20 nt, synthetic construct
  source 1..20: mol_type = other RNA
gacccatagctgtgtgatgt

SEQ ID NO: 8550 - RNA, 20 nt, synthetic construct
  source 1..20: mol_type = other RNA
ccctctctgcctctcaattt

SEQ ID NO: 8551 - RNA, 20 nt, synthetic construct
  source 1..20: mol_type = other RNA
ctctctgcctctcaattttc

SEQ ID NO: 8552 - RNA, 20 nt, synthetic construct
  source 1..20: mol_type = other RNA
ctgcctctcaattttcttgt

SEQ ID NO: 8553 - RNA, 20 nt, synthetic construct
  source 1..20: mol_type = other RNA
gcctctcaattttcttgtct

SEQ ID NO: 8554 - RNA, 20 nt, synthetic construct
  source 1..20: mol_type = other RNA
caattttcttgtctattaaa

SEQ ID NO: 8555 - RNA, 20 nt, synthetic construct
  source 1..20: mol_type = other RNA
attttcttgtctattaaaca

SEQ ID NO: 8556 - RNA, 20 nt, synthetic construct
  source 1..20: mol_type = other RNA
gtttaatagacaagaaaatt

SEQ ID NO: 8557 - RNA, 20 nt, synthetic construct
  source 1..20: mol_type = other RNA
ttcgccccagccctgtggga

SEQ ID NO: 8558 - RNA, 20 nt, synthetic construct
  source 1..20: mol_type = other RNA
ttgtccacaaagcattttca

SEQ ID NO: 8559 - RNA, 20 nt, synthetic construct
  source 1..20: mol_type = other RNA
tctttgtccacaaagcattt

SEQ ID NO: 8560 - RNA, 20 nt, synthetic construct
  source 1..20: mol_type = other RNA
tcctctttgtccacaaagca

SEQ ID NO: 8561 - RNA, 20 nt, synthetic construct
  source 1..20: mol_type = other RNA
aagagaggagccatgtttat

SEQ ID NO: 8562 - RNA, 20 nt, synthetic construct
  source 1..20: mol_type = other RNA
tggagcacttagaactcctc

SEQ ID NO: 8563 - RNA, 20 nt, synthetic construct
  source 1..20: mol_type = other RNA
cttggagcacttagaactcc

SEQ ID NO: 8564 - RNA, 20 nt, synthetic construct
  source 1..20: mol_type = other RNA
tctcttggagcacttagaac

SEQ ID NO: 8565 - RNA, 20 nt, synthetic construct
  source 1..20: mol_type = other RNA
gaaaaaccccaaaagacata

SEQ ID NO: 8566 - RNA, 20 nt, synthetic construct
  source 1..20: mol_type = other RNA
acctcagaaaaaccccaaaa

SEQ ID NO: 8567 - RNA, 20 nt, synthetic construct
  source 1..20: mol_type = other RNA
ctctgttgcccagctgaagt

SEQ ID NO: 8568 - RNA, 20 nt, synthetic construct
  source 1..20: mol_type = other RNA
gttgcccagctgaagtgcag

SEQ ID NO: 8569 - RNA, 20 nt, synthetic construct
  source 1..20: mol_type = other RNA
gctcaccgcaacctctgcct

SEQ ID NO: 8570 - RNA, 20 nt, synthetic construct
  source 1..20: mol_type = other RNA
ccgcaacctctgcctcccgg

SEQ ID NO: 8571 - RNA, 20 nt, synthetic construct
  source 1..20: mol_type = other RNA
gcctcccgggttcaagcaat

SEQ ID NO: 8572 - RNA, 20 nt, synthetic construct
  source 1..20: mol_type = other RNA
cgggttcaagcaattcccct

SEQ ID NO: 8573 - RNA, 20 nt, synthetic construct
  source 1..20: mol_type = other RNA
ctagtagctgggattacagg

SEQ ID NO: 8574 - RNA, 20 nt, synthetic construct
  source 1..20: mol_type = other RNA
actaaaatacaaaaattagc

SEQ ID NO: 8575 - RNA, 20 nt, synthetic construct
  source 1..20: mol_type = other RNA
aactcctgacctcaattgat

SEQ ID NO: 8576 - RNA, 20 nt, synthetic construct
  source 1..20: mol_type = other RNA
tgacctcaattgatccgtct

SEQ ID NO: 8577 - RNA, 20 nt, synthetic construct
  source 1..20: mol_type = other RNA
attgatccgtctgcctcgga

SEQ ID NO: 8578 - RNA, 20 nt, synthetic construct
  source 1..20: mol_type = other RNA
gactcccaaaatgctgggat

SEQ ID NO: 8579 - RNA, 20 nt, synthetic construct
  source 1..20: mol_type = other RNA
caaaatgctgggattacagg

SEQ ID NO: 8580 - RNA, 20 nt, synthetic construct
  source 1..20: mol_type = other RNA
cgcctgtaatcccagcattt

SEQ ID NO: 8581 - RNA, 20 nt, synthetic construct
  source 1..20: mol_type = other RNA
cttataattccatttggggt

SEQ ID NO: 8582 - RNA, 20 nt, synthetic construct
  source 1..20: mol_type = other RNA
tataattccatttggggtct

SEQ ID NO: 8583 - RNA, 20 nt, synthetic construct
  source 1..20: mol_type = other RNA
gcataaacaacataagattt

SEQ ID NO: 8584 - RNA, 20 nt, synthetic construct
  source 1..20: mol_type = other RNA
atttatttctttttaccagc

SEQ ID NO: 8585 - RNA, 20 nt, synthetic construct
  source 1..20: mol_type = other RNA
attgatgaatgtttggattg

SEQ ID NO: 8586 - RNA, 20 nt, synthetic construct
  source 1..20: mol_type = other RNA
tattgaatttcttccagggg

SEQ ID NO: 8587 - RNA, 20 nt, synthetic construct
  source 1..20: mol_type = other RNA
ctttgatctgccagggtgtc

SEQ ID NO: 8588 - RNA, 20 nt, synthetic construct
  source 1..20: mol_type = other RNA
cactttgatctgccagggtg

SEQ ID NO: 8589 - RNA, 20 nt, synthetic construct
  source 1..20: mol_type = other RNA
aataaaactctcactttgat

SEQ ID NO: 8590 - RNA, 20 nt, synthetic construct
  source 1..20: mol_type = other RNA
tctaataaaactctcacttt

SEQ ID NO: 8591 - RNA, 20 nt, synthetic construct
  source 1..20: mol_type = other RNA
accagctttactgtctcctc

SEQ ID NO: 8592 - RNA, 20 nt, synthetic construct
  source 1..20: mol_type = other RNA
ccgctccaccagctttactg

SEQ ID NO: 8593 - RNA, 20 nt, synthetic construct
  source 1..20: mol_type = other RNA
ccccgctccaccagctttac

SEQ ID NO: 8594 - RNA, 20 nt, synthetic construct
  source 1..20: mol_type = other RNA
gactgcaacatgttgattca

SEQ ID NO: 8595 - RNA, 20 nt, synthetic construct
  source 1..20: mol_type = other RNA
taccaccccaagaggcagga

SEQ ID NO: 8596 - RNA, 20 nt, synthetic construct
  source 1..20: mol_type = other RNA
tggggtggtatgagtcctgg

SEQ ID NO: 8597 - RNA, 20 nt, synthetic construct
  source 1..20: mol_type = other RNA
tgcctcttggggtggtatga

SEQ ID NO: 8598 - RNA, 20 nt, synthetic construct
  source 1..20: mol_type = other RNA
gtgcccttctggctgcgctg

SEQ ID NO: 8599 - RNA, 20 nt, synthetic construct
  source 1..20: mol_type = other RNA
tcagtgcccttctggctgcg

SEQ ID NO: 8600 - RNA, 20 nt, synthetic construct
  source 1..20: mol_type = other RNA
ctgtggctcccagcagcggg

SEQ ID NO: 8601 - RNA, 20 nt, synthetic construct
  source 1..20: mol_type = other RNA
cagcagcgggaccagatgca

SEQ ID NO: 8602 - RNA, 20 nt, synthetic construct
  source 1..20: mol_type = other RNA
gtaaagactgaacagggtat

SEQ ID NO: 8603 - RNA, 20 nt, synthetic construct
  source 1..20: mol_type = other RNA
taaaacagcttctgactcag

SEQ ID NO: 8604 - RNA, 20 nt, synthetic construct
  source 1..20: mol_type = other RNA
gctcttaaaacagcttctga

SEQ ID NO: 8605 - RNA, 20 nt, synthetic construct
  source 1..20: mol_type = other RNA
gctgtaaaatgggtgtgctc

SEQ ID NO: 8606 - RNA, 20 nt, synthetic construct
  source 1..20: mol_type = other RNA
agcctcatccttgaatggtg

SEQ ID NO: 8607 - RNA, 20 nt, synthetic construct
  source 1..20: mol_type = other RNA
tccttgaatggtgggtgtac

SEQ ID NO: 8608 - RNA, 20 nt, synthetic construct
  source 1..20: mol_type = other RNA
acacactttagttgctctcc

SEQ ID NO: 8609 - RNA, 20 nt, synthetic construct
  source 1..20: mol_type = other RNA
ccgtttgcacaatgatttct

SEQ ID NO: 8610 - RNA, 20 nt, synthetic construct
  source 1..20: mol_type = other RNA
gtttgcacaatgatttctat

SEQ ID NO: 8611 - RNA, 20 nt, synthetic construct
  source 1..20: mol_type = other RNA
ttgtccacttgcctaattat

SEQ ID NO: 8612 - RNA, 20 nt, synthetic construct
  source 1..20: mol_type = other RNA
agtcagtagcaaactgtgaa

SEQ ID NO: 8613 - RNA, 20 nt, synthetic construct
  source 1..20: mol_type = other RNA
acatctaattctggctgttt

SEQ ID NO: 8614 - RNA, 20 nt, synthetic construct
  source 1..20: mol_type = other RNA
cttgcgactctacatctaat

SEQ ID NO: 8615 - RNA, 20 nt, synthetic construct
  source 1..20: mol_type = other RNA
ctgattagaaatgacgtctt

SEQ ID NO: 8616 - RNA, 20 nt, synthetic construct
  source 1..20: mol_type = other RNA
ttttttctccctgattagaa

SEQ ID NO: 8617 - RNA, 20 nt, synthetic construct
  source 1..20: mol_type = other RNA
agaaggctagcctattgttc

SEQ ID NO: 8618 - RNA, 20 nt, synthetic construct
  source 1..20: mol_type = other RNA
ctccttatacaaaagtaaat

SEQ ID NO: 8619 - RNA, 20 nt, synthetic construct
  source 1..20: mol_type = other RNA
ttatacaaaagtaaatccca

SEQ ID NO: 8620 - RNA, 20 nt, synthetic construct
  source 1..20: mol_type = other RNA
ttttttaaatctttttttaa

SEQ ID NO: 8621 - RNA, 20 nt, synthetic construct
  source 1..20: mol_type = other RNA
ttatcaagatcatataaaaa

SEQ ID NO: 8622 - RNA, 20 nt, synthetic construct
  source 1..20: mol_type = other RNA
tccttatcaagatcatataa

SEQ ID NO: 8623 - RNA, 20 nt, synthetic construct
  source 1..20: mol_type = other RNA
atgaaaattaaaattttcta

SEQ ID NO: 8624 - RNA, 20 nt, synthetic construct
  source 1..20: mol_type = other RNA
tatgtatgttgcaaatctat

SEQ ID NO: 8625 - RNA, 20 nt, synthetic construct
  source 1..20: mol_type = other RNA
acagccaaaatgaaaaaatg

SEQ ID NO: 8626 - RNA, 20 nt, synthetic construct
  source 1..20: mol_type = other RNA
tcattttttcattttggctg

SEQ ID NO: 8627 - RNA, 20 nt, synthetic construct
  source 1..20: mol_type = other RNA
gtgttggcctgggtgtgacc

SEQ ID NO: 8628 - RNA, 20 nt, synthetic construct
  source 1..20: mol_type = other RNA
tggtcacacccaggccaaca

SEQ ID NO: 8629 - RNA, 20 nt, synthetic construct
  source 1..20: mol_type = other RNA
tccttctgggcacttggtgt

SEQ ID NO: 8630 - RNA, 20 nt, synthetic construct
  source 1..20: mol_type = other RNA
ttctgggcacttggtgtgat

SEQ ID NO: 8631 - RNA, 20 nt, synthetic construct
  source 1..20: mol_type = other RNA
cttaggagaaggaaatgtga

SEQ ID NO: 8632 - RNA, 20 nt, synthetic construct
  source 1..20: mol_type = other RNA
taagcgagacacatgaccac

SEQ ID NO: 8633 - RNA, 20 nt, synthetic construct
  source 1..20: mol_type = other RNA
atgcagcttccacacaaaag

SEQ ID NO: 8634 - RNA, 20 nt, synthetic construct
  source 1..20: mol_type = other RNA
ttgctttccgtcagcctcag

SEQ ID NO: 8635 - RNA, 20 nt, synthetic construct
  source 1..20: mol_type = other RNA
gtgttcagcaatgttctgaa

SEQ ID NO: 8636 - RNA, 20 nt, synthetic construct
  source 1..20: mol_type = other RNA
ccccagaaccagactgataa

SEQ ID NO: 8637 - RNA, 20 nt, synthetic construct
  source 1..20: mol_type = other RNA
catgtccatcaaggactttg

SEQ ID NO: 8638 - RNA, 20 nt, synthetic construct
  source 1..20: mol_type = other RNA
cctcacatgtccatcaagga

SEQ ID NO: 8639 - RNA, 20 nt, synthetic construct
  source 1..20: mol_type = other RNA
ggggcttgaaatgtcaaagg

SEQ ID NO: 8640 - RNA, 20 nt, synthetic construct
  source 1..20: mol_type = other RNA
agcactgctcgtgggaagac

SEQ ID NO: 8641 - RNA, 20 nt, synthetic construct
  source 1..20: mol_type = other RNA
tgggaagacatcatcaatat

SEQ ID NO: 8642 - RNA, 20 nt, synthetic construct
  source 1..20: mol_type = other RNA
atattgatgatgtcttccca

SEQ ID NO: 8643 - RNA, 20 nt, synthetic construct
  source 1..20: mol_type = other RNA
aaattccacttccaggaatt

SEQ ID NO: 8644 - RNA, 20 nt, synthetic construct
  source 1..20: mol_type = other RNA
cacatgtgcaaacagctatg

SEQ ID NO: 8645 - RNA, 20 nt, synthetic construct
  source 1..20: mol_type = other RNA
catgtgcaaacagctatgga

SEQ ID NO: 8646 - RNA, 20 nt, synthetic construct
  source 1..20: mol_type = other RNA
gaataaaaaccacactggta

SEQ ID NO: 8647 - RNA, 20 nt, synthetic construct
  source 1..20: mol_type = other RNA
ccaccccaccaatataaata

SEQ ID NO: 8648 - RNA, 20 nt, synthetic construct
  source 1..20: mol_type = other RNA
accccaccaatataaataaa

SEQ ID NO: 8649 - RNA, 20 nt, synthetic construct
  source 1..20: mol_type = other RNA
ttaacccactttttaaaatt

SEQ ID NO: 8650 - RNA, 20 nt, synthetic construct
  source 1..20: mol_type = other RNA
gaaaagatacccaataaata

SEQ ID NO: 8651 - RNA, 20 nt, synthetic construct
  source 1..20: mol_type = other RNA
tgcagttatggaagccagaa

SEQ ID NO: 8652 - RNA, 20 nt, synthetic construct
  source 1..20: mol_type = other RNA
cccaaagctctaggggagga

SEQ ID NO: 8653 - RNA, 20 nt, synthetic construct
  source 1..20: mol_type = other RNA
caaagctctaggggaggaac

SEQ ID NO: 8654 - RNA, 20 nt, synthetic construct
  source 1..20: mol_type = other RNA
aggggaggaacattccttgc

SEQ ID NO: 8655 - RNA, 20 nt, synthetic construct
  source 1..20: mol_type = other RNA
cctagagctttgggagaggg

SEQ ID NO: 8656 - RNA, 20 nt, synthetic construct
  source 1..20: mol_type = other RNA
tttgggggctcctggcattc

SEQ ID NO: 8657 - RNA, 20 nt, synthetic construct
  source 1..20: mol_type = other RNA
tggcattccttggcttatgt

SEQ ID NO: 8658 - RNA, 20 nt, synthetic construct
  source 1..20: mol_type = other RNA
aatcggcgcctccattgtta

SEQ ID NO: 8659 - RNA, 20 nt, synthetic construct
  source 1..20: mol_type = other RNA
attgttacataggtgtttct

SEQ ID NO: 8660 - RNA, 20 nt, synthetic construct
  source 1..20: mol_type = other RNA
agtatctctcccctttctct

SEQ ID NO: 8661 - RNA, 20 nt, synthetic construct
  source 1..20: mol_type = other RNA
cccctttctcttctgatatc

SEQ ID NO: 8662 - RNA, 20 nt, synthetic construct
  source 1..20: mol_type = other RNA
cctttctcttctgatatcag

SEQ ID NO: 8663 - RNA, 20 nt, synthetic construct
  source 1..20: mol_type = other RNA
tctgatatcagtcattggat

SEQ ID NO: 8664 - RNA, 20 nt, synthetic construct
  source 1..20: mol_type = other RNA
tcatgagatccttaggtcaa

SEQ ID NO: 8665 - RNA, 20 nt, synthetic construct
  source 1..20: mol_type = other RNA
tgagatccttaggtcaatta

SEQ ID NO: 8666 - RNA, 20 nt, synthetic construct
  source 1..20: mol_type = other RNA
tgaggagattatcctgggtt

SEQ ID NO: 8667 - RNA, 20 nt, synthetic construct
  source 1..20: mol_type = other RNA
tttccaaataaggtcacatt

SEQ ID NO: 8668 - RNA, 20 nt, synthetic construct
  source 1..20: mol_type = other RNA
gaaggtggtggttcaggagt

SEQ ID NO: 8669 - RNA, 20 nt, synthetic construct
  source 1..20: mol_type = other RNA
tgaaccaccaccttctgagg

SEQ ID NO: 8670 - RNA, 20 nt, synthetic construct
  source 1..20: mol_type = other RNA
cactcctgaaccaccacctt

SEQ ID NO: 8671 - RNA, 20 nt, synthetic construct
  source 1..20: mol_type = other RNA
cttgcaaaaaagagtatgcc

SEQ ID NO: 8672 - RNA, 20 nt, synthetic construct
  source 1..20: mol_type = other RNA
tttttgcaagggagggggca

SEQ ID NO: 8673 - RNA, 20 nt, synthetic construct
  source 1..20: mol_type = other RNA
cagcaatggtggctgcagac

SEQ ID NO: 8674 - RNA, 20 nt, synthetic construct
  source 1..20: mol_type = other RNA
aagtttctgaggttggagaa

SEQ ID NO: 8675 - RNA, 20 nt, synthetic construct
  source 1..20: mol_type = other RNA
gaaacttggagtctgcagcc

SEQ ID NO: 8676 - RNA, 20 nt, synthetic construct
  source 1..20: mol_type = other RNA
aacctcagaaacttggagtc

SEQ ID NO: 8677 - RNA, 20 nt, synthetic construct
  source 1..20: mol_type = other RNA
ctggctaccttctccaacct

SEQ ID NO: 8678 - RNA, 20 nt, synthetic construct
  source 1..20: mol_type = other RNA
cttttatgctccctggctac

SEQ ID NO: 8679 - RNA, 20 nt, synthetic construct
  source 1..20: mol_type = other RNA
ttcagtctatgaggggaagg

SEQ ID NO: 8680 - RNA, 20 nt, synthetic construct
  source 1..20: mol_type = other RNA
tagactgaatgagtagatag

SEQ ID NO: 8681 - RNA, 20 nt, synthetic construct
  source 1..20: mol_type = other RNA
aaatgcttttctagccattg

SEQ ID NO: 8682 - RNA, 20 nt, synthetic construct
  source 1..20: mol_type = other RNA
aaaaatgccacttttactgt

SEQ ID NO: 8683 - RNA, 20 nt, synthetic construct
  source 1..20: mol_type = other RNA
ctctaaaaatgccactttta

SEQ ID NO: 8684 - RNA, 20 nt, synthetic construct
  source 1..20: mol_type = other RNA
aggcttcctccctctaaaaa

SEQ ID NO: 8685 - RNA, 20 nt, synthetic construct
  source 1..20: mol_type = other RNA
ggaagaggcatttagggata

SEQ ID NO: 8686 - RNA, 20 nt, synthetic construct
  source 1..20: mol_type = other RNA
tcctgagttattctttccct

SEQ ID NO: 8687 - RNA, 20 nt, synthetic construct
  source 1..20: mol_type = other RNA
tatccctaaatgcctcttcc

SEQ ID NO: 8688 - RNA, 20 nt, synthetic construct
  source 1..20: mol_type = other RNA
tcttatccctaaatgcctct

SEQ ID NO: 8689 - RNA, 20 nt, synthetic construct
  source 1..20: mol_type = other RNA
tcctcttatccctaaatgcc

SEQ ID NO: 8690 - RNA, 20 nt, synthetic construct
  source 1..20: mol_type = other RNA
cctcctcttatccctaaatg

SEQ ID NO: 8691 - RNA, 20 nt, synthetic construct
  source 1..20: mol_type = other RNA
tctcctcctcttatccctaa

SEQ ID NO: 8692 - RNA, 20 nt, synthetic construct
  source 1..20: mol_type = other RNA
actatctcctctcctcctct

SEQ ID NO: 8693 - RNA, 20 nt, synthetic construct
  source 1..20: mol_type = other RNA
gcagggatcacctacctcca

SEQ ID NO: 8694 - RNA, 20 nt, synthetic construct
  source 1..20: mol_type = other RNA
cctgccccaatctggcctcc

SEQ ID NO: 8695 - RNA, 20 nt, synthetic construct
  source 1..20: mol_type = other RNA
gctgacactcccctgcccca

SEQ ID NO: 8696 - RNA, 20 nt, synthetic construct
  source 1..20: mol_type = other RNA
tatactcagctgacactccc

SEQ ID NO: 8697 - RNA, 20 nt, synthetic construct
  source 1..20: mol_type = other RNA
gccctgaaggaggaaggcag

SEQ ID NO: 8698 - RNA, 20 nt, synthetic construct
  source 1..20: mol_type = other RNA
ttcagggcagaggggaccat

SEQ ID NO: 8699 - RNA, 20 nt, synthetic construct
  source 1..20: mol_type = other RNA
tgccttcctccttcagggca

SEQ ID NO: 8700 - RNA, 20 nt, synthetic construct
  source 1..20: mol_type = other RNA
accacaagtgctttctgggt

SEQ ID NO: 8701 - RNA, 20 nt, synthetic construct
  source 1..20: mol_type = other RNA
cctccaccacaagtgctttc

SEQ ID NO: 8702 - RNA, 20 nt, synthetic construct
  source 1..20: mol_type = other RNA
tctggggcctcccctccacc

SEQ ID NO: 8703 - RNA, 20 nt, synthetic construct
  source 1..20: mol_type = other RNA
caggggagctggctgcttat

SEQ ID NO: 8704 - RNA, 20 nt, synthetic construct
  source 1..20: mol_type = other RNA
ggggagctggctgcttattt

SEQ ID NO: 8705 - RNA, 20 nt, synthetic construct
  source 1..20: mol_type = other RNA
cctgagaggtaccagcaatc

SEQ ID NO: 8706 - RNA, 20 nt, synthetic construct
  source 1..20: mol_type = other RNA
aatgggttcccccacaccct

SEQ ID NO: 8707 - RNA, 20 nt, synthetic construct
  source 1..20: mol_type = other RNA
tctcaaatgggttcccccac

SEQ ID NO: 8708 - RNA, 20 nt, synthetic construct
  source 1..20: mol_type = other RNA
ctcttctcaaatgggttccc

SEQ ID NO: 8709 - RNA, 20 nt, synthetic construct
  source 1..20: mol_type = other RNA
cataagttgcccaaaggaat

SEQ ID NO: 8710 - RNA, 20 nt, synthetic construct
  source 1..20: mol_type = other RNA
ccaattacccctcccataag

SEQ ID NO: 8711 - RNA, 20 nt, synthetic construct
  source 1..20: mol_type = other RNA
tgccacttggcagggctttc

SEQ ID NO: 8712 - RNA, 20 nt, synthetic construct
  source 1..20: mol_type = other RNA
taagagtgcagtggaggata

SEQ ID NO: 8713 - RNA, 20 nt, synthetic construct
  source 1..20: mol_type = other RNA
tatgaggggcagccccagct

SEQ ID NO: 8714 - RNA, 20 nt, synthetic construct
  source 1..20: mol_type = other RNA
actgcactcttatgaggggc

SEQ ID NO: 8715 - RNA, 20 nt, synthetic construct
  source 1..20: mol_type = other RNA
tcccatatcctccactgcac

SEQ ID NO: 8716 - RNA, 20 nt, synthetic construct
  source 1..20: mol_type = other RNA
ggttccatctgtcgcagagc

SEQ ID NO: 8717 - RNA, 20 nt, synthetic construct
  source 1..20: mol_type = other RNA
gcgacagatggaaccagagg

SEQ ID NO: 8718 - RNA, 20 nt, synthetic construct
  source 1..20: mol_type = other RNA
cccacctccctcagaacaca

SEQ ID NO: 8719 - RNA, 20 nt, synthetic construct
  source 1..20: mol_type = other RNA
ctcagaacacacccactgca

SEQ ID NO: 8720 - RNA, 20 nt, synthetic construct
  source 1..20: mol_type = other RNA
gaacacacccactgcatgct

SEQ ID NO: 8721 - RNA, 20 nt, synthetic construct
  source 1..20: mol_type = other RNA
gtgcacaggcttcatcattc

SEQ ID NO: 8722 - RNA, 20 nt, synthetic construct
  source 1..20: mol_type = other RNA
gggtgcacggtaacgacccc

SEQ ID NO: 8723 - RNA, 20 nt, synthetic construct
  source 1..20: mol_type = other RNA
cctaccggggtcgttaccgt

SEQ ID NO: 8724 - RNA, 20 nt, synthetic construct
  source 1..20: mol_type = other RNA
cacctaccggggtcgttacc

SEQ ID NO: 8725 - RNA, 20 nt, synthetic construct
  source 1..20: mol_type = other RNA
cctttgggaccttggcctct

SEQ ID NO: 8726 - RNA, 20 nt, synthetic construct
  source 1..20: mol_type = other RNA
catctattcttgctccaggg

SEQ ID NO: 8727 - RNA, 20 nt, synthetic construct
  source 1..20: mol_type = other RNA
aggggaggcctttgatgagg

SEQ ID NO: 8728 - RNA, 20 nt, synthetic construct
  source 1..20: mol_type = other RNA
cctggagcaagaatagatgg

SEQ ID NO: 8729 - RNA, 20 nt, synthetic construct
  source 1..20: mol_type = other RNA
tcaaaggcctcccctggagc

SEQ ID NO: 8730 - RNA, 20 nt, synthetic construct
  source 1..20: mol_type = other RNA
ttcctgttgcctgtaattgg

SEQ ID NO: 8731 - RNA, 20 nt, synthetic construct
  source 1..20: mol_type = other RNA
gccacctctgtcagcaaacc

SEQ ID NO: 8732 - RNA, 20 nt, synthetic construct
  source 1..20: mol_type = other RNA
gtcagcaaaccatgagctcc

SEQ ID NO: 8733 - RNA, 20 nt, synthetic construct
  source 1..20: mol_type = other RNA
tggtttgctgacagaggtgg

SEQ ID NO: 8734 - RNA, 20 nt, synthetic construct
  source 1..20: mol_type = other RNA
tactctgtgctgcgatggcg

SEQ ID NO: 8735 - RNA, 20 nt, synthetic construct
  source 1..20: mol_type = other RNA
gtgctgcgatggcgggctcg

SEQ ID NO: 8736 - RNA, 20 nt, synthetic construct
  source 1..20: mol_type = other RNA
atggggataactctgacctt

SEQ ID NO: 8737 - RNA, 20 nt, synthetic construct
  source 1..20: mol_type = other RNA
gaccttacctcatggagtca

SEQ ID NO: 8738 - RNA, 20 nt, synthetic construct
  source 1..20: mol_type = other RNA
tggagtcactgtcaacccac

SEQ ID NO: 8739 - RNA, 20 nt, synthetic construct
  source 1..20: mol_type = other RNA
atgaggtaaggtcagagtta

SEQ ID NO: 8740 - RNA, 20 nt, synthetic construct
  source 1..20: mol_type = other RNA
ctggagtgaggtctttgcaa

SEQ ID NO: 8741 - RNA, 20 nt, synthetic construct
  source 1..20: mol_type = other RNA
ggagtgaggtctttgcaaac

SEQ ID NO: 8742 - RNA, 20 nt, synthetic construct
  source 1..20: mol_type = other RNA
agagagccagtgcacaaaga

SEQ ID NO: 8743 - RNA, 20 nt, synthetic construct
  source 1..20: mol_type = other RNA
ctccagagagccagtgcaca

SEQ ID NO: 8744 - RNA, 20 nt, synthetic construct
  source 1..20: mol_type = other RNA
ttccactttgtttgcaaaga

SEQ ID NO: 8745 - RNA, 20 nt, synthetic construct
  source 1..20: mol_type = other RNA
agcacctagattcagagcag

SEQ ID NO: 8746 - RNA, 20 nt, synthetic construct
  source 1..20: mol_type = other RNA
gaatctaggtgctggagtcc

SEQ ID NO: 8747 - RNA, 20 nt, synthetic construct
  source 1..20: mol_type = other RNA
gaatctgctgtgcatctgca

SEQ ID NO: 8748 - RNA, 20 nt, synthetic construct
  source 1..20: mol_type = other RNA
cttgcagatgcacagcagat

SEQ ID NO: 8749 - RNA, 20 nt, synthetic construct
  source 1..20: mol_type = other RNA
ttctggaagggctgtcgata

SEQ ID NO: 8750 - RNA, 20 nt, synthetic construct
  source 1..20: mol_type = other RNA
tgtcatgccacatgtacaat

SEQ ID NO: 8751 - RNA, 20 nt, synthetic construct
  source 1..20: mol_type = other RNA
gattgtacatgtggcatgac

SEQ ID NO: 8752 - RNA, 20 nt, synthetic construct
  source 1..20: mol_type = other RNA
tggcctcagattgtacatgt

SEQ ID NO: 8753 - RNA, 20 nt, synthetic construct
  source 1..20: mol_type = other RNA
ctttccccttttcatcctcc

SEQ ID NO: 8754 - RNA, 20 nt, synthetic construct
  source 1..20: mol_type = other RNA
ttccccttttcatcctcctg

SEQ ID NO: 8755 - RNA, 20 nt, synthetic construct
  source 1..20: mol_type = other RNA
tgcctggtacacaataggtg

SEQ ID NO: 8756 - RNA, 20 nt, synthetic construct
  source 1..20: mol_type = other RNA
gctttccagaagattcaatt

SEQ ID NO: 8757 - RNA, 20 nt, synthetic construct
  source 1..20: mol_type = other RNA
tcaaggagcagctagttggt

SEQ ID NO: 8758 - RNA, 20 nt, synthetic construct
  source 1..20: mol_type = other RNA
ttgaagagattgcttgcttt

SEQ ID NO: 8759 - RNA, 20 nt, synthetic construct
  source 1..20: mol_type = other RNA
gccctttatgcaccctgcac

SEQ ID NO: 8760 - RNA, 20 nt, synthetic construct
  source 1..20: mol_type = other RNA
ggcctctgccctttatgcac

SEQ ID NO: 8761 - RNA, 20 nt, synthetic construct
  source 1..20: mol_type = other RNA
ctgcccaccgaattctttcc

SEQ ID NO: 8762 - RNA, 20 nt, synthetic construct
  source 1..20: mol_type = other RNA
tcgctgcccaccgaattctt

SEQ ID NO: 8763 - RNA, 20 nt, synthetic construct
  source 1..20: mol_type = other RNA
ctggtcagcaggagacaagg

SEQ ID NO: 8764 - RNA, 20 nt, synthetic construct
  source 1..20: mol_type = other RNA
tgctgaccagtgagacttct

SEQ ID NO: 8765 - RNA, 20 nt, synthetic construct
  source 1..20: mol_type = other RNA
aagttctgccgggcccacct

SEQ ID NO: 8766 - RNA, 20 nt, synthetic construct
  source 1..20: mol_type = other RNA
ccctgcgtgggatgccagac

SEQ ID NO: 8767 - RNA, 20 nt, synthetic construct
  source 1..20: mol_type = other RNA
caccctgcgtgggatgccag

SEQ ID NO: 8768 - RNA, 20 nt, synthetic construct
  source 1..20: mol_type = other RNA
cgcctctcaccctgcgtggg

SEQ ID NO: 8769 - RNA, 20 nt, synthetic construct
  source 1..20: mol_type = other RNA
cccgcctctcaccctgcgtg

SEQ ID NO: 8770 - RNA, 20 nt, synthetic construct
  source 1..20: mol_type = other RNA
tctcccgcctctcaccctgc

SEQ ID NO: 8771 - RNA, 20 nt, synthetic construct
  source 1..20: mol_type = other RNA
tcctctcccgcctctcaccc

SEQ ID NO: 8772 - RNA, 20 nt, synthetic construct
  source 1..20: mol_type = other RNA
caaatcctaactgggctgga

SEQ ID NO: 8773 - RNA, 20 nt, synthetic construct
  source 1..20: mol_type = other RNA
gcgcgtaatctgacgctgtt

SEQ ID NO: 8774 - RNA, 20 nt, synthetic construct
  source 1..20: mol_type = other RNA
ccaaacagcgtcagattacg

SEQ ID NO: 8775 - RNA, 20 nt, synthetic construct
  source 1..20: mol_type = other RNA
ccctccccaaacagcgtcag

SEQ ID NO: 8776 - RNA, 20 nt, synthetic construct
  source 1..20: mol_type = other RNA
agtccgggggttccgttaat

SEQ ID NO: 8777 - RNA, 20 nt, synthetic construct
  source 1..20: mol_type = other RNA
ggtggcgtgatctgcgcgcc

SEQ ID NO: 8778 - RNA, 20 nt, synthetic construct
  source 1..20: mol_type = other RNA
acgtcgctgcggaaaccttc

SEQ ID NO: 8779 - RNA, 20 nt, synthetic construct
  source 1..20: mol_type = other RNA
tggttgcaggcgggcgccgc

SEQ ID NO: 8780 - RNA, 20 nt, synthetic construct
  source 1..20: mol_type = other RNA
gaccctgaactgaacggcgg

SEQ ID NO: 8781 - RNA, 20 nt, synthetic construct
  source 1..20: mol_type = other RNA
aggctcagaccctgaactga

SEQ ID NO: 8782 - RNA, 20 nt, synthetic construct
  source 1..20: mol_type = other RNA
tccaggctcagaccctgaac

SEQ ID NO: 8783 - RNA, 20 nt, synthetic construct
  source 1..20: mol_type = other RNA
ctcctccaggctcagaccct

SEQ ID NO: 8784 - RNA, 20 nt, synthetic construct
  source 1..20: mol_type = other RNA
ctgcctggctcactcctcca

SEQ ID NO: 8785 - RNA, 20 nt, synthetic construct
  source 1..20: mol_type = other RNA
ggcgggccgggacgcgtcgt

SEQ ID NO: 8786 - RNA, 20 nt, synthetic construct
  source 1..20: mol_type = other RNA
cagctcccagccaggattcc

SEQ ID NO: 8787 - RNA, 20 nt, synthetic construct
  source 1..20: mol_type = other RNA
cagccaggattccgcgcgcc

SEQ ID NO: 8788 - RNA, 20 nt, synthetic construct
  source 1..20: mol_type = other RNA
tgaacttcagctcctgcaca

SEQ ID NO: 8789 - RNA, 20 nt, synthetic construct
  source 1..20: mol_type = other RNA
tgcacagtcctccccaccgc

SEQ ID NO: 8790 - RNA, 20 nt, synthetic construct
  source 1..20: mol_type = other RNA
ccaccgcaaggctcaaggcg

SEQ ID NO: 8791 - RNA, 20 nt, synthetic construct
  source 1..20: mol_type = other RNA
aggcgccgccggcgtggacc

SEQ ID NO: 8792 - RNA, 20 nt, synthetic construct
  source 1..20: mol_type = other RNA
aggtctcctcgccaggacag

SEQ ID NO: 8793 - RNA, 20 nt, synthetic construct
  source 1..20: mol_type = other RNA
tcgccaggacagcaacctct

SEQ ID NO: 8794 - RNA, 20 nt, synthetic construct
  source 1..20: mol_type = other RNA
ccaggacagcaacctctccc

SEQ ID NO: 8795 - RNA, 20 nt, synthetic construct
  source 1..20: mol_type = other RNA
cccctggccctcatgggcac

SEQ ID NO: 8796 - RNA, 20 nt, synthetic construct
  source 1..20: mol_type = other RNA
cctggccctcatgggcaccg

SEQ ID NO: 8797 - RNA, 20 nt, synthetic construct
  source 1..20: mol_type = other RNA
tgggcaccgtcagctccagg

SEQ ID NO: 8798 - RNA, 20 nt, synthetic construct
  source 1..20: mol_type = other RNA
aggcggtcctggtggccgct

SEQ ID NO: 8799 - RNA, 20 nt, synthetic construct
  source 1..20: mol_type = other RNA
tgggtcccgcgggcgcccgt

SEQ ID NO: 8800 - RNA, 20 nt, synthetic construct
  source 1..20: mol_type = other RNA
tgcgcacgggcgcccgcggg

SEQ ID NO: 8801 - RNA, 20 nt, synthetic construct
  source 1..20: mol_type = other RNA
tcctcctgcgcacgggcgcc

SEQ ID NO: 8802 - RNA, 20 nt, synthetic construct
  source 1..20: mol_type = other RNA
tagtcgccgtcctcgtcctc

SEQ ID NO: 8803 - RNA, 20 nt, synthetic construct
  source 1..20: mol_type = other RNA
tcgtagtcgccgtcctcgtc

SEQ ID NO: 8804 - RNA, 20 nt, synthetic construct
  source 1..20: mol_type = other RNA
gaacgcaaggctagcaccag

SEQ ID NO: 8805 - RNA, 20 nt, synthetic construct
  source 1..20: mol_type = other RNA
tcggaacgcaaggctagcac

SEQ ID NO: 8806 - RNA, 20 nt, synthetic construct
  source 1..20: mol_type = other RNA
ggtgcttcggccaggccgtc

SEQ ID NO: 8807 - RNA, 20 nt, synthetic construct
  source 1..20: mol_type = other RNA
catccctacacccgcacctt

SEQ ID NO: 8808 - RNA, 20 nt, synthetic construct
  source 1..20: mol_type = other RNA
cgggcctcagtttcccccca

SEQ ID NO: 8809 - RNA, 20 nt, synthetic construct
  source 1..20: mol_type = other RNA
ggcctcagtttccccccatg

SEQ ID NO: 8810 - RNA, 20 nt, synthetic construct
  source 1..20: mol_type = other RNA
gtttccccccatgtaagaga

SEQ ID NO: 8811 - RNA, 20 nt, synthetic construct
  source 1..20: mol_type = other RNA
tacatggggggaaactgagg

SEQ ID NO: 8812 - RNA, 20 nt, synthetic construct
  source 1..20: mol_type = other RNA
cttacatggggggaaactga

SEQ ID NO: 8813 - RNA, 20 nt, synthetic construct
  source 1..20: mol_type = other RNA
acttcctctcttacatgggg

SEQ ID NO: 8814 - RNA, 20 nt, synthetic construct
  source 1..20: mol_type = other RNA
gcgacctgcactccacttcc

SEQ ID NO: 8815 - RNA, 20 nt, synthetic construct
  source 1..20: mol_type = other RNA
tcgcttggcacgatcttggg

SEQ ID NO: 8816 - RNA, 20 nt, synthetic construct
  source 1..20: mol_type = other RNA
cccgccgccttgcctgcagt

SEQ ID NO: 8817 - RNA, 20 nt, synthetic construct
  source 1..20: mol_type = other RNA
ccactacccgtcctcccccg

SEQ ID NO: 8818 - RNA, 20 nt, synthetic construct
  source 1..20: mol_type = other RNA
accgtgctccccactacccg

SEQ ID NO: 8819 - RNA, 20 nt, synthetic construct
  source 1..20: mol_type = other RNA
ccaccgtgctccccactacc

SEQ ID NO: 8820 - RNA, 20 nt, synthetic construct
  source 1..20: mol_type = other RNA
ttggggacttgctggggcgt

SEQ ID NO: 8821 - RNA, 20 nt, synthetic construct
  source 1..20: mol_type = other RNA
caaccccgcgaaccttccca

SEQ ID NO: 8822 - RNA, 20 nt, synthetic construct
  source 1..20: mol_type = other RNA
gggtctcccaaccccgcgaa

SEQ ID NO: 8823 - RNA, 20 nt, synthetic construct
  source 1..20: mol_type = other RNA
gcctccgggtctcccaaccc

SEQ ID NO: 8824 - RNA, 20 nt, synthetic construct
  source 1..20: mol_type = other RNA
cccttcctcggcctccgggt

SEQ ID NO: 8825 - RNA, 20 nt, synthetic construct
  source 1..20: mol_type = other RNA
gctcgcccttcctcggcctc

SEQ ID NO: 8826 - RNA, 20 nt, synthetic construct
  source 1..20: mol_type = other RNA
ccgcggcacaggtgggtgaa

SEQ ID NO: 8827 - RNA, 20 nt, synthetic construct
  source 1..20: mol_type = other RNA
ttcacccacctgtgccgcgg

SEQ ID NO: 8828 - RNA, 20 nt, synthetic construct
  source 1..20: mol_type = other RNA
gtgcctggtgcagttcccag

SEQ ID NO: 8829 - RNA, 20 nt, synthetic construct
  source 1..20: mol_type = other RNA
gctgcccatgttttccaaac

SEQ ID NO: 8830 - RNA, 20 nt, synthetic construct
  source 1..20: mol_type = other RNA
accctccgctgcccatgttt

SEQ ID NO: 8831 - RNA, 20 nt, synthetic construct
  source 1..20: mol_type = other RNA
aggccctccaccctccgctg

SEQ ID NO: 8832 - RNA, 20 nt, synthetic construct
  source 1..20: mol_type = other RNA
ccaggccctccaccctccgc

SEQ ID NO: 8833 - RNA, 20 nt, synthetic construct
  source 1..20: mol_type = other RNA
ggtagggccttctctccagg

SEQ ID NO: 8834 - RNA, 20 nt, synthetic construct
  source 1..20: mol_type = other RNA
cagcatctgccgtccttccc

SEQ ID NO: 8835 - RNA, 20 nt, synthetic construct
  source 1..20: mol_type = other RNA
tgctcccagcatctgccgtc

SEQ ID NO: 8836 - RNA, 20 nt, synthetic construct
  source 1..20: mol_type = other RNA
tgctctagtattccatctgt

SEQ ID NO: 8837 - RNA, 20 nt, synthetic construct
  source 1..20: mol_type = other RNA
agtattccatctgtttcagc

SEQ ID NO: 8838 - RNA, 20 nt, synthetic construct
  source 1..20: mol_type = other RNA
cctgccccttcagctggttc

SEQ ID NO: 8839 - RNA, 20 nt, synthetic construct
  source 1..20: mol_type = other RNA
gccccttctcccctgcccct

SEQ ID NO: 8840 - RNA, 20 nt, synthetic construct
  source 1..20: mol_type = other RNA
aggcccattggcgtccttta

SEQ ID NO: 8841 - RNA, 20 nt, synthetic construct
  source 1..20: mol_type = other RNA
agaatacctccgccccttct

SEQ ID NO: 8842 - RNA, 20 nt, synthetic construct
  source 1..20: mol_type = other RNA
ggcagggaagggcccttggt

SEQ ID NO: 8843 - RNA, 20 nt, synthetic construct
  source 1..20: mol_type = other RNA
ggagccggaggtggtgcgcc

SEQ ID NO: 8844 - RNA, 20 nt, synthetic construct
  source 1..20: mol_type = other RNA
agagcaccaagggcccttcc

SEQ ID NO: 8845 - RNA, 20 nt, synthetic construct
  source 1..20: mol_type = other RNA
ggctccagagcaccaagggc

SEQ ID NO: 8846 - RNA, 20 nt, synthetic construct
  source 1..20: mol_type = other RNA
ggggtcccagtaccaggcgc

SEQ ID NO: 8847 - RNA, 20 nt, synthetic construct
  source 1..20: mol_type = other RNA
gctccggggtcccagtacca

SEQ ID NO: 8848 - RNA, 20 nt, synthetic construct
  source 1..20: mol_type = other RNA
gcccacctggctgtctgccg

SEQ ID NO: 8849 - RNA, 20 nt, synthetic construct
  source 1..20: mol_type = other RNA
ccccgcacacggtcggcaga

SEQ ID NO: 8850 - RNA, 20 nt, synthetic construct
  source 1..20: mol_type = other RNA
acaactctgccagcttctgg

SEQ ID NO: 8851 - RNA, 20 nt, synthetic construct
  source 1..20: mol_type = other RNA
gccagcttctggccctcagg

SEQ ID NO: 8852 - RNA, 20 nt, synthetic construct
  source 1..20: mol_type = other RNA
ggctgtgggaagcttcttcc

SEQ ID NO: 8853 - RNA, 20 nt, synthetic construct
  source 1..20: mol_type = other RNA
ccccgggaagaagcttccca

SEQ ID NO: 8854 - RNA, 20 nt, synthetic construct
  source 1..20: mol_type = other RNA
gccaagtcctgggctggtaa

SEQ ID NO: 8855 - RNA, 20 nt, synthetic construct
  source 1..20: mol_type = other RNA
aagctgggggacacagaacc

SEQ ID NO: 8856 - RNA, 20 nt, synthetic construct
  source 1..20: mol_type = other RNA
cactagctgtggtgcttgac

SEQ ID NO: 8857 - RNA, 20 nt, synthetic construct
  source 1..20: mol_type = other RNA
ctagctgtggtgcttgacaa

SEQ ID NO: 8858 - RNA, 20 nt, synthetic construct
  source 1..20: mol_type = other RNA
aggataagtgacttgtcaag

SEQ ID NO: 8859 - RNA, 20 nt, synthetic construct
  source 1..20: mol_type = other RNA
attgcctaatctttaaaagg

SEQ ID NO: 8860 - RNA, 20 nt, synthetic construct
  source 1..20: mol_type = other RNA
cttttaaagattaggcaatg

SEQ ID NO: 8861 - RNA, 20 nt, synthetic construct
  source 1..20: mol_type = other RNA
gtggcagcagatggggagat

SEQ ID NO: 8862 - RNA, 20 nt, synthetic construct
  source 1..20: mol_type = other RNA
ccatctgctgccactgagcc

SEQ ID NO: 8863 - RNA, 20 nt, synthetic construct
  source 1..20: mol_type = other RNA
tggtcaacagaactttccct

SEQ ID NO: 8864 - RNA, 20 nt, synthetic construct
  source 1..20: mol_type = other RNA
aaaccacagctcctggggca

SEQ ID NO: 8865 - RNA, 20 nt, synthetic construct
  source 1..20: mol_type = other RNA
tggggcagaggggaaaattc

SEQ ID NO: 8866 - RNA, 20 nt, synthetic construct
  source 1..20: mol_type = other RNA
gccccaggagctgtggtttg

SEQ ID NO: 8867 - RNA, 20 nt, synthetic construct
  source 1..20: mol_type = other RNA
cagctgcctgcccacgcttc

SEQ ID NO: 8868 - RNA, 20 nt, synthetic construct
  source 1..20: mol_type = other RNA
gacagaagcgtgggcaggca

SEQ ID NO: 8869 - RNA, 20 nt, synthetic construct
  source 1..20: mol_type = other RNA
gctcagtatagccctcttcc

SEQ ID NO: 8870 - RNA, 20 nt, synthetic construct
  source 1..20: mol_type = other RNA
gtatagccctcttccttgtt

SEQ ID NO: 8871 - RNA, 20 nt, synthetic construct
  source 1..20: mol_type = other RNA
tccttgttccctgagccttt

SEQ ID NO: 8872 - RNA, 20 nt, synthetic construct
  source 1..20: mol_type = other RNA
gggaacaaggaagagggcta

SEQ ID NO: 8873 - RNA, 20 nt, synthetic construct
  source 1..20: mol_type = other RNA
agggatgttgtggggttgtg

SEQ ID NO: 8874 - RNA, 20 nt, synthetic construct
  source 1..20: mol_type = other RNA
agaaagtcaaaggctcaggg

SEQ ID NO: 8875 - RNA, 20 nt, synthetic construct
  source 1..20: mol_type = other RNA
aaaacaactgttctggaaat

SEQ ID NO: 8876 - RNA, 20 nt, synthetic construct
  source 1..20: mol_type = other RNA
ctatttccagaacagttgtt

SEQ ID NO: 8877 - RNA, 20 nt, synthetic construct
  source 1..20: mol_type = other RNA
ggatggggtactcactattt

SEQ ID NO: 8878 - RNA, 20 nt, synthetic construct
  source 1..20: mol_type = other RNA
caggatggggtactcactat

SEQ ID NO: 8879 - RNA, 20 nt, synthetic construct
  source 1..20: mol_type = other RNA
cctctcaggatggggtactc

SEQ ID NO: 8880 - RNA, 20 nt, synthetic construct
  source 1..20: mol_type = other RNA
gcttactcacctctcaggat

SEQ ID NO: 8881 - RNA, 20 nt, synthetic construct
  source 1..20: mol_type = other RNA
agggcttggttcaggtggtc

SEQ ID NO: 8882 - RNA, 20 nt, synthetic construct
  source 1..20: mol_type = other RNA
ggtggaagtttggaacagga

SEQ ID NO: 8883 - RNA, 20 nt, synthetic construct
  source 1..20: mol_type = other RNA
tgttccaaacttccaccaga

SEQ ID NO: 8884 - RNA, 20 nt, synthetic construct
  source 1..20: mol_type = other RNA
tcaagttcatttattcattc

SEQ ID NO: 8885 - RNA, 20 nt, synthetic construct
  source 1..20: mol_type = other RNA
agttcatttattcattcatt

SEQ ID NO: 8886 - RNA, 20 nt, synthetic construct
  source 1..20: mol_type = other RNA
tgactaaaagaaaaggattg

SEQ ID NO: 8887 - RNA, 20 nt, synthetic construct
  source 1..20: mol_type = other RNA
gtttctcatgactaaaagaa

SEQ ID NO: 8888 - RNA, 20 nt, synthetic construct
  source 1..20: mol_type = other RNA
gggcctcagtttctcatgac

SEQ ID NO: 8889 - RNA, 20 nt, synthetic construct
  source 1..20: mol_type = other RNA
ctgggcctcagtttctcatg

SEQ ID NO: 8890 - RNA, 20 nt, synthetic construct
  source 1..20: mol_type = other RNA
ctctgggcctcagtttctca

SEQ ID NO: 8891 - RNA, 20 nt, synthetic construct
  source 1..20: mol_type = other RNA
tctctctgggcctcagtttc

SEQ ID NO: 8892 - RNA, 20 nt, synthetic construct
  source 1..20: mol_type = other RNA
actgcacagagtactctccc

SEQ ID NO: 8893 - RNA, 20 nt, synthetic construct
  source 1..20: mol_type = other RNA
gtgcagtggagtgtcagttc

SEQ ID NO: 8894 - RNA, 20 nt, synthetic construct
  source 1..20: mol_type = other RNA
cccaattcattcaattttta

SEQ ID NO: 8895 - RNA, 20 nt, synthetic construct
  source 1..20: mol_type = other RNA
caattcattcaatttttatt

SEQ ID NO: 8896 - RNA, 20 nt, synthetic construct
  source 1..20: mol_type = other RNA
tactaatgcttcaaagaccc

SEQ ID NO: 8897 - RNA, 20 nt, synthetic construct
  source 1..20: mol_type = other RNA
tgacaccatcatcgctgaac

SEQ ID NO: 8898 - RNA, 20 nt, synthetic construct
  source 1..20: mol_type = other RNA
taatcctagaataaaattct

SEQ ID NO: 8899 - RNA, 20 nt, synthetic construct
  source 1..20: mol_type = other RNA
gtatctttgttcatggtacc

SEQ ID NO: 8900 - RNA, 20 nt, synthetic construct
  source 1..20: mol_type = other RNA
ggttttcccagctctgtatc

SEQ ID NO: 8901 - RNA, 20 nt, synthetic construct
  source 1..20: mol_type = other RNA
ttatcttccacctctggttt

SEQ ID NO: 8902 - RNA, 20 nt, synthetic construct
  source 1..20: mol_type = other RNA
aaaaaaaaagaaaaagaact

SEQ ID NO: 8903 - RNA, 20 nt, synthetic construct
  source 1..20: mol_type = other RNA
atctcaaaaaaaaaagaaaa

SEQ ID NO: 8904 - RNA, 20 nt, synthetic construct
  source 1..20: mol_type = other RNA
tgttgcccaggctggagtgc

SEQ ID NO: 8905 - RNA, 20 nt, synthetic construct
  source 1..20: mol_type = other RNA
agcctgggcaacaagagcga

SEQ ID NO: 8906 - RNA, 20 nt, synthetic construct
  source 1..20: mol_type = other RNA
gctcactgcaacatctgtct

SEQ ID NO: 8907 - RNA, 20 nt, synthetic construct
  source 1..20: mol_type = other RNA
ctgcaacatctgtctcccgg

SEQ ID NO: 8908 - RNA, 20 nt, synthetic construct
  source 1..20: mol_type = other RNA
cgggttcaagtggttctcct

SEQ ID NO: 8909 - RNA, 20 nt, synthetic construct
  source 1..20: mol_type = other RNA
tgcctcagcctcccaagaag

SEQ ID NO: 8910 - RNA, 20 nt, synthetic construct
  source 1..20: mol_type = other RNA
gcctcccaagaagctgggat

SEQ ID NO: 8911 - RNA, 20 nt, synthetic construct
  source 1..20: mol_type = other RNA
caagaagctgggattacagg

SEQ ID NO: 8912 - RNA, 20 nt, synthetic construct
  source 1..20: mol_type = other RNA
actaaaaatacaaaaattag

SEQ ID NO: 8913 - RNA, 20 nt, synthetic construct
  source 1..20: mol_type = other RNA
tgacctcctcagtggatccg

SEQ ID NO: 8914 - RNA, 20 nt, synthetic construct
  source 1..20: mol_type = other RNA
tcagtggatccgaggaggtg

SEQ ID NO: 8915 - RNA, 20 nt, synthetic construct
  source 1..20: mol_type = other RNA
gtggatccgaggaggtgatc

SEQ ID NO: 8916 - RNA, 20 nt, synthetic construct
  source 1..20: mol_type = other RNA
gatccactgaggaggtcagg

SEQ ID NO: 8917 - RNA, 20 nt, synthetic construct
  source 1..20: mol_type = other RNA
tcggatccactgaggaggtc

SEQ ID NO: 8918 - RNA, 20 nt, synthetic construct
  source 1..20: mol_type = other RNA
cgcctcagcctcccaaagtg

SEQ ID NO: 8919 - RNA, 20 nt, synthetic construct
  source 1..20: mol_type = other RNA
gcctcccaaagtgctcgaat

SEQ ID NO: 8920 - RNA, 20 nt, synthetic construct
  source 1..20: mol_type = other RNA
caaagtgctcgaattacagg

SEQ ID NO: 8921 - RNA, 20 nt, synthetic construct
  source 1..20: mol_type = other RNA
aattacaggtgtgagccacc

SEQ ID NO: 8922 - RNA, 20 nt, synthetic construct
  source 1..20: mol_type = other RNA
cacctgtaattcgagcactt

SEQ ID NO: 8923 - RNA, 20 nt, synthetic construct
  source 1..20: mol_type = other RNA
acagttctttatccaccgtc

SEQ ID NO: 8924 - RNA, 20 nt, synthetic construct
  source 1..20: mol_type = other RNA
tgtcagttcacgtcaggtgc

SEQ ID NO: 8925 - RNA, 20 nt, synthetic construct
  source 1..20: mol_type = other RNA
agattcttccaagcagactc

SEQ ID NO: 8926 - RNA, 20 nt, synthetic construct
  source 1..20: mol_type = other RNA
gattgcccattactgccttt

SEQ ID NO: 8927 - RNA, 20 nt, synthetic construct
  source 1..20: mol_type = other RNA
gaacttgtttggattttaga

SEQ ID NO: 8928 - RNA, 20 nt, synthetic construct
  source 1..20: mol_type = other RNA
gttctactctgactggagtc

SEQ ID NO: 8929 - RNA, 20 nt, synthetic construct
  source 1..20: mol_type = other RNA
gactggagtccaagatgcat

SEQ ID NO: 8930 - RNA, 20 nt, synthetic construct
  source 1..20: mol_type = other RNA
agtcagagtagaacagagtc

SEQ ID NO: 8931 - RNA, 20 nt, synthetic construct
  source 1..20: mol_type = other RNA
gtatatatgcatcttggact

SEQ ID NO: 8932 - RNA, 20 nt, synthetic construct
  source 1..20: mol_type = other RNA
acctaccttgcagccccatc

SEQ ID NO: 8933 - RNA, 20 nt, synthetic construct
  source 1..20: mol_type = other RNA
ttggcccctacctcaaccta

SEQ ID NO: 8934 - RNA, 20 nt, synthetic construct
  source 1..20: mol_type = other RNA
tccttggcccctacctcaac

SEQ ID NO: 8935 - RNA, 20 nt, synthetic construct
  source 1..20: mol_type = other RNA
atgctcctccttggccccta

SEQ ID NO: 8936 - RNA, 20 nt, synthetic construct
  source 1..20: mol_type = other RNA
tgaatcaagtccaaactcca

SEQ ID NO: 8937 - RNA, 20 nt, synthetic construct
  source 1..20: mol_type = other RNA
ccacagcctcatgaatcaag

SEQ ID NO: 8938 - RNA, 20 nt, synthetic construct
  source 1..20: mol_type = other RNA
ggcagacatacctgcttaag

SEQ ID NO: 8939 - RNA, 20 nt, synthetic construct
  source 1..20: mol_type = other RNA
caggcagacatacctgctta

SEQ ID NO: 8940 - RNA, 20 nt, synthetic construct
  source 1..20: mol_type = other RNA
aactgctctcaggcagacat

SEQ ID NO: 8941 - RNA, 20 nt, synthetic construct
  source 1..20: mol_type = other RNA
tgtctgctccaactgctctc

SEQ ID NO: 8942 - RNA, 20 nt, synthetic construct
  source 1..20: mol_type = other RNA
aaatctcatgtggaaatttg

SEQ ID NO: 8943 - RNA, 20 nt, synthetic construct
  source 1..20: mol_type = other RNA
tgtggaaatttggtcctcag

SEQ ID NO: 8944 - RNA, 20 nt, synthetic construct
  source 1..20: mol_type = other RNA
gtgttggaagtggggcctaa

SEQ ID NO: 8945 - RNA, 20 nt, synthetic construct
  source 1..20: mol_type = other RNA
cattaggccccacttccaac

SEQ ID NO: 8946 - RNA, 20 nt, synthetic construct
  source 1..20: mol_type = other RNA
cccatgacccaaacacctcc

SEQ ID NO: 8947 - RNA, 20 nt, synthetic construct
  source 1..20: mol_type = other RNA
ttatcacaaggacggcacca

SEQ ID NO: 8948 - RNA, 20 nt, synthetic construct
  source 1..20: mol_type = other RNA
cgctatgatttcccttgaag

SEQ ID NO: 8949 - RNA, 20 nt, synthetic construct
  source 1..20: mol_type = other RNA
ttttaataatcagccttcaa

SEQ ID NO: 8950 - RNA, 20 nt, synthetic construct
  source 1..20: mol_type = other RNA
ctctcttctctcttgcttct

SEQ ID NO: 8951 - RNA, 20 nt, synthetic construct
  source 1..20: mol_type = other RNA
cttctctcttgcttcttctc

SEQ ID NO: 8952 - RNA, 20 nt, synthetic construct
  source 1..20: mol_type = other RNA
tctctcttgcttcttctctt

SEQ ID NO: 8953 - RNA, 20 nt, synthetic construct
  source 1..20: mol_type = other RNA
cttgcttcttctcttgccat

SEQ ID NO: 8954 - RNA, 20 nt, synthetic construct
  source 1..20: mol_type = other RNA
tgcttcttctcttgccatgt

SEQ ID NO: 8955 - RNA, 20 nt, synthetic construct
  source 1..20: mol_type = other RNA
tgccatgtgattgatctctg

SEQ ID NO: 8956 - RNA, 20 nt, synthetic construct
  source 1..20: mol_type = other RNA
gcacatgtaggctccccttc

SEQ ID NO: 8957 - RNA, 20 nt, synthetic construct
  source 1..20: mol_type = other RNA
ccttcaccttctgccatcag

SEQ ID NO: 8958 - RNA, 20 nt, synthetic construct
  source 1..20: mol_type = other RNA
ccagaagcagatgctggtgc

SEQ ID NO: 8959 - RNA, 20 nt, synthetic construct
  source 1..20: mol_type = other RNA
aggaagcatggcaccagcat

SEQ ID NO: 8960 - RNA, 20 nt, synthetic construct
  source 1..20: mol_type = other RNA
ccaggaagcatggcaccagc

SEQ ID NO: 8961 - RNA, 20 nt, synthetic construct
  source 1..20: mol_type = other RNA
tgattctgcaagctctccag

SEQ ID NO: 8962 - RNA, 20 nt, synthetic construct
  source 1..20: mol_type = other RNA
ccttcaggtattcctttata

SEQ ID NO: 8963 - RNA, 20 nt, synthetic construct
  source 1..20: mol_type = other RNA
ctctttaagaagtgttgcct

SEQ ID NO: 8964 - RNA, 20 nt, synthetic construct
  source 1..20: mol_type = other RNA
ctttaagaagtgttgccttt

SEQ ID NO: 8965 - RNA, 20 nt, synthetic construct
  source 1..20: mol_type = other RNA
ttaagaagtgttgcctttgc

SEQ ID NO: 8966 - RNA, 20 nt, synthetic construct
  source 1..20: mol_type = other RNA
cttagtcatcccttctgcct

SEQ ID NO: 8967 - RNA, 20 nt, synthetic construct
  source 1..20: mol_type = other RNA
acaaatgcaggcagaaggga

SEQ ID NO: 8968 - RNA, 20 nt, synthetic construct
  source 1..20: mol_type = other RNA
catccagatgctctacaaat

SEQ ID NO: 8969 - RNA, 20 nt, synthetic construct
  source 1..20: mol_type = other RNA
tgactttcccagcaggccta

SEQ ID NO: 8970 - RNA, 20 nt, synthetic construct
  source 1..20: mol_type = other RNA
acaatacagcagaggtatct

SEQ ID NO: 8971 - RNA, 20 nt, synthetic construct
  source 1..20: mol_type = other RNA
gctgtattgtagagaccaca

SEQ ID NO: 8972 - RNA, 20 nt, synthetic construct
  source 1..20: mol_type = other RNA
gatacctctgctgtattgta

SEQ ID NO: 8973 - RNA, 20 nt, synthetic construct
  source 1..20: mol_type = other RNA
gagaggttgagtgacttgct

SEQ ID NO: 8974 - RNA, 20 nt, synthetic construct
  source 1..20: mol_type = other RNA
gagcctcagatacctctgct

SEQ ID NO: 8975 - RNA, 20 nt, synthetic construct
  source 1..20: mol_type = other RNA
cggagcctcagatacctctg

SEQ ID NO: 8976 - RNA, 20 nt, synthetic construct
  source 1..20: mol_type = other RNA
acctctcggagcctcagata

SEQ ID NO: 8977 - RNA, 20 nt, synthetic construct
  source 1..20: mol_type = other RNA
tggctgcacaaccagtaaat

SEQ ID NO: 8978 - RNA, 20 nt, synthetic construct
  source 1..20: mol_type = other RNA
aatatttactggttgtgcag

SEQ ID NO: 8979 - RNA, 20 nt, synthetic construct
  source 1..20: mol_type = other RNA
aaagcccatgattttttccc

SEQ ID NO: 8980 - RNA, 20 nt, synthetic construct
  source 1..20: mol_type = other RNA
atttattctgactggggcat

SEQ ID NO: 8981 - RNA, 20 nt, synthetic construct
  source 1..20: mol_type = other RNA
cccatgccccagtcagaata

SEQ ID NO: 8982 - RNA, 20 nt, synthetic construct
  source 1..20: mol_type = other RNA
tggtggccctgcccaaaggc

SEQ ID NO: 8983 - RNA, 20 nt, synthetic construct
  source 1..20: mol_type = other RNA
acgggcctggtcgctcctgg

SEQ ID NO: 8984 - RNA, 20 nt, synthetic construct
  source 1..20: mol_type = other RNA
ctacgggcctggtcgctcct

SEQ ID NO: 8985 - RNA, 20 nt, synthetic construct
  source 1..20: mol_type = other RNA
gtacctgcacccagctctct

SEQ ID NO: 8986 - RNA, 20 nt, synthetic construct
  source 1..20: mol_type = other RNA
acaacaggttttcctctgta

SEQ ID NO: 8987 - RNA, 20 nt, synthetic construct
  source 1..20: mol_type = other RNA
tataggccaactattattat

SEQ ID NO: 8988 - RNA, 20 nt, synthetic construct
  source 1..20: mol_type = other RNA
gttgtgtctcttttgttgta

SEQ ID NO: 8989 - RNA, 20 nt, synthetic construct
  source 1..20: mol_type = other RNA
tttgttgtaatttgtaagta

SEQ ID NO: 8990 - RNA, 20 nt, synthetic construct
  source 1..20: mol_type = other RNA
cccctacttacaaattacaa

SEQ ID NO: 8991 - RNA, 20 nt, synthetic construct
  source 1..20: mol_type = other RNA
ttgcatggggccaggatccg

SEQ ID NO: 8992 - RNA, 20 nt, synthetic construct
  source 1..20: mol_type = other RNA
acggatcctggccccatgca

SEQ ID NO: 8993 - RNA, 20 nt, synthetic construct
  source 1..20: mol_type = other RNA
ttcagcaccaccacgtaggt

SEQ ID NO: 8994 - RNA, 20 nt, synthetic construct
  source 1..20: mol_type = other RNA
tccttcagcaccaccacgta

SEQ ID NO: 8995 - RNA, 20 nt, synthetic construct
  source 1..20: mol_type = other RNA
cgcagtcagagcgcactgcc

SEQ ID NO: 8996 - RNA, 20 nt, synthetic construct
  source 1..20: mol_type = other RNA
cagtcagagcgcactgcccg

SEQ ID NO: 8997 - RNA, 20 nt, synthetic construct
  source 1..20: mol_type = other RNA
gactgcgagaggtgggtctc

SEQ ID NO: 8998 - RNA, 20 nt, synthetic construct
  source 1..20: mol_type = other RNA
ccaagatcctgcatgtcttc

SEQ ID NO: 8999 - RNA, 20 nt, synthetic construct
  source 1..20: mol_type = other RNA
tcttcaccaggaagccagga

SEQ ID NO: 9000 - RNA, 20 nt, synthetic construct
  source 1..20: mol_type = other RNA
agcaggtcgccactcatctt

SEQ ID NO: 9001 - RNA, 20 nt, synthetic construct
  source 1..20: mol_type = other RNA
ccagctccagcaggtcgcca

SEQ ID NO: 9002 - RNA, 20 nt, synthetic construct
  source 1..20: mol_type = other RNA
atacatacttgctgtcccct

SEQ ID NO: 9003 - RNA, 20 nt, synthetic construct
  source 1..20: mol_type = other RNA
tctttcaaatgaagatagac

SEQ ID NO: 9004 - RNA, 20 nt, synthetic construct
  source 1..20: mol_type = other RNA
tcgtctttcaaatgaagata

SEQ ID NO: 9005 - RNA, 20 nt, synthetic construct
  source 1..20: mol_type = other RNA
gaacttcagtctcctcgtct

SEQ ID NO: 9006 - RNA, 20 nt, synthetic construct
  source 1..20: mol_type = other RNA
acccctagctgtctgtgtgg

SEQ ID NO: 9007 - RNA, 20 nt, synthetic construct
  source 1..20: mol_type = other RNA
actgaacatcccagggcctt

SEQ ID NO: 9008 - RNA, 20 nt, synthetic construct
  source 1..20: mol_type = other RNA
ggctccactgaacatcccag

SEQ ID NO: 9009 - RNA, 20 nt, synthetic construct
  source 1..20: mol_type = other RNA
agggtccaaaattcctttga

SEQ ID NO: 9010 - RNA, 20 nt, synthetic construct
  source 1..20: mol_type = other RNA
ggatagcaacagcttcaaag

SEQ ID NO: 9011 - RNA, 20 nt, synthetic construct
  source 1..20: mol_type = other RNA
tccctcctggatgtcacatc

SEQ ID NO: 9012 - RNA, 20 nt, synthetic construct
  source 1..20: mol_type = other RNA
ctcctggatgtcacatcttc

SEQ ID NO: 9013 - RNA, 20 nt, synthetic construct
  source 1..20: mol_type = other RNA
tggatgtcacatcttcggtg

SEQ ID NO: 9014 - RNA, 20 nt, synthetic construct
  source 1..20: mol_type = other RNA
accgaagatgtgacatccag

SEQ ID NO: 9015 - RNA, 20 nt, synthetic construct
  source 1..20: mol_type = other RNA
tcaccctggccctagtgctt

SEQ ID NO: 9016 - RNA, 20 nt, synthetic construct
  source 1..20: mol_type = other RNA
ccctggccctagtgcttcaa

SEQ ID NO: 9017 - RNA, 20 nt, synthetic construct
  source 1..20: mol_type = other RNA
tttcctggcctctaacttga

SEQ ID NO: 9018 - RNA, 20 nt, synthetic construct
  source 1..20: mol_type = other RNA
aacttgatgagagcgtgtgt

SEQ ID NO: 9019 - RNA, 20 nt, synthetic construct
  source 1..20: mol_type = other RNA
tcaagttagaggccaggaaa

SEQ ID NO: 9020 - RNA, 20 nt, synthetic construct
  source 1..20: mol_type = other RNA
catcaagttagaggccagga

SEQ ID NO: 9021 - RNA, 20 nt, synthetic construct
  source 1..20: mol_type = other RNA
acatggcaggcggtgcttct

SEQ ID NO: 9022 - RNA, 20 nt, synthetic construct
  source 1..20: mol_type = other RNA
tgcagacagtgaggccccac

SEQ ID NO: 9023 - RNA, 20 nt, synthetic construct
  source 1..20: mol_type = other RNA
ctgtctgcaggaggctaaga

SEQ ID NO: 9024 - RNA, 20 nt, synthetic construct
  source 1..20: mol_type = other RNA
gaccctgcccattacacgct

SEQ ID NO: 9025 - RNA, 20 nt, synthetic construct
  source 1..20: mol_type = other RNA
agactctgaccctgcccatt

SEQ ID NO: 9026 - RNA, 20 nt, synthetic construct
  source 1..20: mol_type = other RNA
tagctgcactgcactgctgc

SEQ ID NO: 9027 - RNA, 20 nt, synthetic construct
  source 1..20: mol_type = other RNA
gcataccgtggctgaacagc

SEQ ID NO: 9028 - RNA, 20 nt, synthetic construct
  source 1..20: mol_type = other RNA
taccaaggcctgtggcgcca

SEQ ID NO: 9029 - RNA, 20 nt, synthetic construct
  source 1..20: mol_type = other RNA
acttagactacgggtttcca

SEQ ID NO: 9030 - RNA, 20 nt, synthetic construct
  source 1..20: mol_type = other RNA
tctacttagactacgggttt

SEQ ID NO: 9031 - RNA, 20 nt, synthetic construct
  source 1..20: mol_type = other RNA
acacacgtttaccaagtgcc

SEQ ID NO: 9032 - RNA, 20 nt, synthetic construct
  source 1..20: mol_type = other RNA
gcagcacacagtaggcactt

SEQ ID NO: 9033 - RNA, 20 nt, synthetic construct
  source 1..20: mol_type = other RNA
ggcctttcccttgagcttac

SEQ ID NO: 9034 - RNA, 20 nt, synthetic construct
  source 1..20: mol_type = other RNA
agggaaaggcctgagctgtg

SEQ ID NO: 9035 - RNA, 20 nt, synthetic construct
  source 1..20: mol_type = other RNA
tgaactgtaagctcaaggga

SEQ ID NO: 9036 - RNA, 20 nt, synthetic construct
  source 1..20: mol_type = other RNA
tcctgaactgtaagctcaag

SEQ ID NO: 9037 - RNA, 20 nt, synthetic construct
  source 1..20: mol_type = other RNA
cctcctgaactgtaagctca

SEQ ID NO: 9038 - RNA, 20 nt, synthetic construct
  source 1..20: mol_type = other RNA
gccttggggagagacgaaga

SEQ ID NO: 9039 - RNA, 20 nt, synthetic construct
  source 1..20: mol_type = other RNA
ccaaggctgagcacattgtc

SEQ ID NO: 9040 - RNA, 20 nt, synthetic construct
  source 1..20: mol_type = other RNA
ccccaaggctgagcacattg

SEQ ID NO: 9041 - RNA, 20 nt, synthetic construct
  source 1..20: mol_type = other RNA
tgcctgtcatctggtgctat

SEQ ID NO: 9042 - RNA, 20 nt, synthetic construct
  source 1..20: mol_type = other RNA
gaggagagtaggccaagcag

SEQ ID NO: 9043 - RNA, 20 nt, synthetic construct
  source 1..20: mol_type = other RNA
gagcagctgccctggcctgt

SEQ ID NO: 9044 - RNA, 20 nt, synthetic construct
  source 1..20: mol_type = other RNA
tctgagcagctgccctggcc

SEQ ID NO: 9045 - RNA, 20 nt, synthetic construct
  source 1..20: mol_type = other RNA
cctctgagcagctgccctgg

SEQ ID NO: 9046 - RNA, 20 nt, synthetic construct
  source 1..20: mol_type = other RNA
atggcaaatgcctgcagcct

SEQ ID NO: 9047 - RNA, 20 nt, synthetic construct
  source 1..20: mol_type = other RNA
cgatggcaaatgcctgcagc

SEQ ID NO: 9048 - RNA, 20 nt, synthetic construct
  source 1..20: mol_type = other RNA
aacccaggctggtatgatgc

SEQ ID NO: 9049 - RNA, 20 nt, synthetic construct
  source 1..20: mol_type = other RNA
gggttagacagccaataagg

SEQ ID NO: 9050 - RNA, 20 nt, synthetic construct
  source 1..20: mol_type = other RNA
ctgagcctcattcctctatc

SEQ ID NO: 9051 - RNA, 20 nt, synthetic construct
  source 1..20: mol_type = other RNA
gagcctcattcctctatctg

SEQ ID NO: 9052 - RNA, 20 nt, synthetic construct
  source 1..20: mol_type = other RNA
gagaggtgaagggatttgct

SEQ ID NO: 9053 - RNA, 20 nt, synthetic construct
  source 1..20: mol_type = other RNA
ttcctctatctgtaaaccag

SEQ ID NO: 9054 - RNA, 20 nt, synthetic construct
  source 1..20: mol_type = other RNA
atctgtaaaccagttataat

SEQ ID NO: 9055 - RNA, 20 nt, synthetic construct
  source 1..20: mol_type = other RNA
tttagtccttaaatgaatgt

SEQ ID NO: 9056 - RNA, 20 nt, synthetic construct
  source 1..20: mol_type = other RNA
ctgaagtgggggcaggttaa

SEQ ID NO: 9057 - RNA, 20 nt, synthetic construct
  source 1..20: mol_type = other RNA
ggggatacgaaggcatccag

SEQ ID NO: 9058 - RNA, 20 nt, synthetic construct
  source 1..20: mol_type = other RNA
tgccacaactagtccctgga

SEQ ID NO: 9059 - RNA, 20 nt, synthetic construct
  source 1..20: mol_type = other RNA
ttacccttcagacctaagtg

SEQ ID NO: 9060 - RNA, 20 nt, synthetic construct
  source 1..20: mol_type = other RNA
ccttacccttcagacctaag

SEQ ID NO: 9061 - RNA, 20 nt, synthetic construct
  source 1..20: mol_type = other RNA
gcccagttggagccggtggc

SEQ ID NO: 9062 - RNA, 20 nt, synthetic construct
  source 1..20: mol_type = other RNA
aactgggcagagggaaagct

SEQ ID NO: 9063 - RNA, 20 nt, synthetic construct
  source 1..20: mol_type = other RNA
atgccaccggctccaactgg

SEQ ID NO: 9064 - RNA, 20 nt, synthetic construct
  source 1..20: mol_type = other RNA
tccatgccaccggctccaac

SEQ ID NO: 9065 - RNA, 20 nt, synthetic construct
  source 1..20: mol_type = other RNA
cctccatgccaccggctcca

SEQ ID NO: 9066 - RNA, 20 nt, synthetic construct
  source 1..20: mol_type = other RNA
ggtgattccccacaggcagc

SEQ ID NO: 9067 - RNA, 20 nt, synthetic construct
  source 1..20: mol_type = other RNA
ctgcgcatggcagcggtgaa

SEQ ID NO: 9068 - RNA, 20 nt, synthetic construct
  source 1..20: mol_type = other RNA
tgactccctgcgcatggcag

SEQ ID NO: 9069 - RNA, 20 nt, synthetic construct
  source 1..20: mol_type = other RNA
ctacctcctgactccctgcg

SEQ ID NO: 9070 - RNA, 20 nt, synthetic construct
  source 1..20: mol_type = other RNA
ctccctacctcctgactccc

SEQ ID NO: 9071 - RNA, 20 nt, synthetic construct
  source 1..20: mol_type = other RNA
aaaaaaaaaaaaaatggtgt

SEQ ID NO: 9072 - RNA, 20 nt, synthetic construct
  source 1..20: mol_type = other RNA
gttgcccagactggagtgca

SEQ ID NO: 9073 - RNA, 20 nt, synthetic construct
  source 1..20: mol_type = other RNA
agtctgggcaacagagtctc

SEQ ID NO: 9074 - RNA, 20 nt, synthetic construct
  source 1..20: mol_type = other RNA
gcctcccgggttcaagctca

SEQ ID NO: 9075 - RNA, 20 nt, synthetic construct
  source 1..20: mol_type = other RNA
cgggttcaagctcactgcaa

SEQ ID NO: 9076 - RNA, 20 nt, synthetic construct
  source 1..20: mol_type = other RNA
ctgcaacctctgcctcccgg

SEQ ID NO: 9077 - RNA, 20 nt, synthetic construct
  source 1..20: mol_type = other RNA
gcctcccgggttcaagcgat

SEQ ID NO: 9078 - RNA, 20 nt, synthetic construct
  source 1..20: mol_type = other RNA
cgggttcaagcgattctcct

SEQ ID NO: 9079 - RNA, 20 nt, synthetic construct
  source 1..20: mol_type = other RNA
tgcctcagcctcccgagtag

SEQ ID NO: 9080 - RNA, 20 nt, synthetic construct
  source 1..20: mol_type = other RNA
gcctcccgagtagctgggac

SEQ ID NO: 9081 - RNA, 20 nt, synthetic construct
  source 1..20: mol_type = other RNA
cgagtagctgggactacagg

SEQ ID NO: 9082 - RNA, 20 nt, synthetic construct
  source 1..20: mol_type = other RNA
ggaggctgaggcaggagaat

SEQ ID NO: 9083 - RNA, 20 nt, synthetic construct
  source 1..20: mol_type = other RNA
attaaaaatacaaaaattag

SEQ ID NO: 9084 - RNA, 20 nt, synthetic construct
  source 1..20: mol_type = other RNA
aactctcgacctcaggtgat

SEQ ID NO: 9085 - RNA, 20 nt, synthetic construct
  source 1..20: mol_type = other RNA
cgacctcaggtgatccccca

SEQ ID NO: 9086 - RNA, 20 nt, synthetic construct
  source 1..20: mol_type = other RNA
acctcaggtgatcccccacc

SEQ ID NO: 9087 - RNA, 20 nt, synthetic construct
  source 1..20: mol_type = other RNA
ggtgatcccccacctcggcc

SEQ ID NO: 9088 - RNA, 20 nt, synthetic construct
  source 1..20: mol_type = other RNA
gcctcccaaagtgctgggat

SEQ ID NO: 9089 - RNA, 20 nt, synthetic construct
  source 1..20: mol_type = other RNA
caaagtgctgggattacagg

SEQ ID NO: 9090 - RNA, 20 nt, synthetic construct
  source 1..20: mol_type = other RNA
cgcctgtaatcccagcactt

SEQ ID NO: 9091 - RNA, 20 nt, synthetic construct
  source 1..20: mol_type = other RNA
cagctgctgatgcactcttg

SEQ ID NO: 9092 - RNA, 20 nt, synthetic construct
  source 1..20: mol_type = other RNA
tgtccttctaactcctgcta

SEQ ID NO: 9093 - RNA, 20 nt, synthetic construct
  source 1..20: mol_type = other RNA
tgctagtgcctcccattggc

SEQ ID NO: 9094 - RNA, 20 nt, synthetic construct
  source 1..20: mol_type = other RNA
cattggctgagcccaactgg

SEQ ID NO: 9095 - RNA, 20 nt, synthetic construct
  source 1..20: mol_type = other RNA
gccaatgggaggcactagca

SEQ ID NO: 9096 - RNA, 20 nt, synthetic construct
  source 1..20: mol_type = other RNA
cttgcaaagcttccagttgg

SEQ ID NO: 9097 - RNA, 20 nt, synthetic construct
  source 1..20: mol_type = other RNA
gtgcaaactgcagcaccagc

SEQ ID NO: 9098 - RNA, 20 nt, synthetic construct
  source 1..20: mol_type = other RNA
agcctgctcagtgcaaactg

SEQ ID NO: 9099 - RNA, 20 nt, synthetic construct
  source 1..20: mol_type = other RNA
agccttctccagcctgctca

SEQ ID NO: 9100 - RNA, 20 nt, synthetic construct
  source 1..20: mol_type = other RNA
atgcctaaatcatgacataa

SEQ ID NO: 9101 - RNA, 20 nt, synthetic construct
  source 1..20: mol_type = other RNA
ggccctggactccatgccta

SEQ ID NO: 9102 - RNA, 20 nt, synthetic construct
  source 1..20: mol_type = other RNA
atgtccatcctgcccagagc

SEQ ID NO: 9103 - RNA, 20 nt, synthetic construct
  source 1..20: mol_type = other RNA
gggcaggatggacatggagt

SEQ ID NO: 9104 - RNA, 20 nt, synthetic construct
  source 1..20: mol_type = other RNA
cagacaagatgtcaagttca

SEQ ID NO: 9105 - RNA, 20 nt, synthetic construct
  source 1..20: mol_type = other RNA
atgccagaccgtgttgcagg

SEQ ID NO: 9106 - RNA, 20 nt, synthetic construct
  source 1..20: mol_type = other RNA
catatccctgcaacacggtc

SEQ ID NO: 9107 - RNA, 20 nt, synthetic construct
  source 1..20: mol_type = other RNA
cagcctgatcaaggagcgag

SEQ ID NO: 9108 - RNA, 20 nt, synthetic construct
  source 1..20: mol_type = other RNA
ttgatcaggctgggagccca

SEQ ID NO: 9109 - RNA, 20 nt, synthetic construct
  source 1..20: mol_type = other RNA
ctccttgatcaggctgggag

SEQ ID NO: 9110 - RNA, 20 nt, synthetic construct
  source 1..20: mol_type = other RNA
ggctcctagtctgtcctccg

SEQ ID NO: 9111 - RNA, 20 nt, synthetic construct
  source 1..20: mol_type = other RNA
tagtctgtcctccggggcac

SEQ ID NO: 9112 - RNA, 20 nt, synthetic construct
  source 1..20: mol_type = other RNA
ggggcactagcagggacaag

SEQ ID NO: 9113 - RNA, 20 nt, synthetic construct
  source 1..20: mol_type = other RNA
caccttgtccctgctagtgc

SEQ ID NO: 9114 - RNA, 20 nt, synthetic construct
  source 1..20: mol_type = other RNA
gcttaagccatttggacagc

SEQ ID NO: 9115 - RNA, 20 nt, synthetic construct
  source 1..20: mol_type = other RNA
ctggcttctgcaggccttga

SEQ ID NO: 9116 - RNA, 20 nt, synthetic construct
  source 1..20: mol_type = other RNA
ggcttctgcaggccttgaag

SEQ ID NO: 9117 - RNA, 20 nt, synthetic construct
  source 1..20: mol_type = other RNA
atgtagtcgacatggggcaa

SEQ ID NO: 9118 - RNA, 20 nt, synthetic construct
  source 1..20: mol_type = other RNA
tcgatgtagtcgacatgggg

SEQ ID NO: 9119 - RNA, 20 nt, synthetic construct
  source 1..20: mol_type = other RNA
tctgtctttgcccagagcat

SEQ ID NO: 9120 - RNA, 20 nt, synthetic construct
  source 1..20: mol_type = other RNA
gtctttgcccagagcatccc

SEQ ID NO: 9121 - RNA, 20 nt, synthetic construct
  source 1..20: mol_type = other RNA
gggcaaagacagaggagtcc

SEQ ID NO: 9122 - RNA, 20 nt, synthetic construct
  source 1..20: mol_type = other RNA
aggttccacgggatgctctg

SEQ ID NO: 9123 - RNA, 20 nt, synthetic construct
  source 1..20: mol_type = other RNA
acggtaccgggcggatgaat

SEQ ID NO: 9124 - RNA, 20 nt, synthetic construct
  source 1..20: mol_type = other RNA
gatggggtggggcagggcac

SEQ ID NO: 9125 - RNA, 20 nt, synthetic construct
  source 1..20: mol_type = other RNA
gccctggcctggcctccctg

SEQ ID NO: 9126 - RNA, 20 nt, synthetic construct
  source 1..20: mol_type = other RNA
ctgctggtggtttccacttc

SEQ ID NO: 9127 - RNA, 20 nt, synthetic construct
  source 1..20: mol_type = other RNA
gggggctttgggactcagca

SEQ ID NO: 9128 - RNA, 20 nt, synthetic construct
  source 1..20: mol_type = other RNA
gcacctccactgaccccttt

SEQ ID NO: 9129 - RNA, 20 nt, synthetic construct
  source 1..20: mol_type = other RNA
actgacccctttttttctgt

SEQ ID NO: 9130 - RNA, 20 nt, synthetic construct
  source 1..20: mol_type = other RNA
tttccttcttttctcttgtt

SEQ ID NO: 9131 - RNA, 20 nt, synthetic construct
  source 1..20: mol_type = other RNA
tgttttccttttctcaccat

SEQ ID NO: 9132 - RNA, 20 nt, synthetic construct
  source 1..20: mol_type = other RNA
ccatttggaatggcccagca

SEQ ID NO: 9133 - RNA, 20 nt, synthetic construct
  source 1..20: mol_type = other RNA
ttccaaggtaagtgcagcct

SEQ ID NO: 9134 - RNA, 20 nt, synthetic construct
  source 1..20: mol_type = other RNA
acctagggcccccaggcctc

SEQ ID NO: 9135 - RNA, 20 nt, synthetic construct
  source 1..20: mol_type = other RNA
ataactcccagtgccctgca

SEQ ID NO: 9136 - RNA, 20 nt, synthetic construct
  source 1..20: mol_type = other RNA
cagtgccctgcagactggac

SEQ ID NO: 9137 - RNA, 20 nt, synthetic construct
  source 1..20: mol_type = other RNA
gcctaccttcctgttttgct

SEQ ID NO: 9138 - RNA, 20 nt, synthetic construct
  source 1..20: mol_type = other RNA
acctgcctccagctccgttt

SEQ ID NO: 9139 - RNA, 20 nt, synthetic construct
  source 1..20: mol_type = other RNA
agctccgtttggcttcctgg

SEQ ID NO: 9140 - RNA, 20 nt, synthetic construct
  source 1..20: mol_type = other RNA
gtttggcttcctggggctcc

SEQ ID NO: 9141 - RNA, 20 nt, synthetic construct
  source 1..20: mol_type = other RNA
ctgcctgggccactttgtgt

SEQ ID NO: 9142 - RNA, 20 nt, synthetic construct
  source 1..20: mol_type = other RNA
aggcctttctttccactgtt

SEQ ID NO: 9143 - RNA, 20 nt, synthetic construct
  source 1..20: mol_type = other RNA
gcctggtgtggcctggctat

SEQ ID NO: 9144 - RNA, 20 nt, synthetic construct
  source 1..20: mol_type = other RNA
cttccatagccaggccacac

SEQ ID NO: 9145 - RNA, 20 nt, synthetic construct
  source 1..20: mol_type = other RNA
ctcccttccatagccaggcc

SEQ ID NO: 9146 - RNA, 20 nt, synthetic construct
  source 1..20: mol_type = other RNA
tccctcccttccatagccag

SEQ ID NO: 9147 - RNA, 20 nt, synthetic construct
  source 1..20: mol_type = other RNA
tcctccctcccttccatagc

SEQ ID NO: 9148 - RNA, 20 nt, synthetic construct
  source 1..20: mol_type = other RNA
agatgcacctggcctgagga

SEQ ID NO: 9149 - RNA, 20 nt, synthetic construct
  source 1..20: mol_type = other RNA
ggccaggtgcatctagagtc

SEQ ID NO: 9150 - RNA, 20 nt, synthetic construct
  source 1..20: mol_type = other RNA
tcaggccaggtgcatctaga

SEQ ID NO: 9151 - RNA, 20 nt, synthetic construct
  source 1..20: mol_type = other RNA
cctcaggccaggtgcatcta

SEQ ID NO: 9152 - RNA, 20 nt, synthetic construct
  source 1..20: mol_type = other RNA
aacttaacacagtccaacta

SEQ ID NO: 9153 - RNA, 20 nt, synthetic construct
  source 1..20: mol_type = other RNA
caccatgggcacctcaaact

SEQ ID NO: 9154 - RNA, 20 nt, synthetic construct
  source 1..20: mol_type = other RNA
agacctcacaccatgggcac

SEQ ID NO: 9155 - RNA, 20 nt, synthetic construct
  source 1..20: mol_type = other RNA
gcgcagagatgatgcaatgt

SEQ ID NO: 9156 - RNA, 20 nt, synthetic construct
  source 1..20: mol_type = other RNA
gcgctgagctccagacctca

SEQ ID NO: 9157 - RNA, 20 nt, synthetic construct
  source 1..20: mol_type = other RNA
gcgtcctggcaccatgttgc

SEQ ID NO: 9158 - RNA, 20 nt, synthetic construct
  source 1..20: mol_type = other RNA
gctttcaccccttaccggtt

SEQ ID NO: 9159 - RNA, 20 nt, synthetic construct
  source 1..20: mol_type = other RNA
tgggatcttgggaagccact

SEQ ID NO: 9160 - RNA, 20 nt, synthetic construct
  source 1..20: mol_type = other RNA
tagaagaaagtggcttccca

SEQ ID NO: 9161 - RNA, 20 nt, synthetic construct
  source 1..20: mol_type = other RNA
caggttgctgtgagactcca

SEQ ID NO: 9162 - RNA, 20 nt, synthetic construct
  source 1..20: mol_type = other RNA
cagcaacctgtgagaaggac

SEQ ID NO: 9163 - RNA, 20 nt, synthetic construct
  source 1..20: mol_type = other RNA
aatgagttgaaggatgtgca

SEQ ID NO: 9164 - RNA, 20 nt, synthetic construct
  source 1..20: mol_type = other RNA
ttggagtctcacagcaacct

SEQ ID NO: 9165 - RNA, 20 nt, synthetic construct
  source 1..20: mol_type = other RNA
gacatatgcaaggtcacaca

SEQ ID NO: 9166 - RNA, 20 nt, synthetic construct
  source 1..20: mol_type = other RNA
gatctgttgcaatggcagca

SEQ ID NO: 9167 - RNA, 20 nt, synthetic construct
  source 1..20: mol_type = other RNA
acacccagcccaccagctct

SEQ ID NO: 9168 - RNA, 20 nt, synthetic construct
  source 1..20: mol_type = other RNA
ggcaagggtggcagcagcag

SEQ ID NO: 9169 - RNA, 20 nt, synthetic construct
  source 1..20: mol_type = other RNA
cttctgctgctgccaccctt

SEQ ID NO: 9170 - RNA, 20 nt, synthetic construct
  source 1..20: mol_type = other RNA
ctggccacaggctgcccagg

SEQ ID NO: 9171 - RNA, 20 nt, synthetic construct
  source 1..20: mol_type = other RNA
ccctggccacaggctgccca

SEQ ID NO: 9172 - RNA, 20 nt, synthetic construct
  source 1..20: mol_type = other RNA
tctgtaggaagagcctgttc

SEQ ID NO: 9173 - RNA, 20 nt, synthetic construct
  source 1..20: mol_type = other RNA
gtaggaagagcctgttcctt

SEQ ID NO: 9174 - RNA, 20 nt, synthetic construct
  source 1..20: mol_type = other RNA
tcctacagaggagctgtcct

SEQ ID NO: 9175 - RNA, 20 nt, synthetic construct
  source 1..20: mol_type = other RNA
cctggttggaaaggaacagg

SEQ ID NO: 9176 - RNA, 20 nt, synthetic construct
  source 1..20: mol_type = other RNA
tcagtggagccctggagccc

SEQ ID NO: 9177 - RNA, 20 nt, synthetic construct
  source 1..20: mol_type = other RNA
actgaagaggtctcacctgg

SEQ ID NO: 9178 - RNA, 20 nt, synthetic construct
  source 1..20: mol_type = other RNA
agggctccactgaagaggtc

SEQ ID NO: 9179 - RNA, 20 nt, synthetic construct
  source 1..20: mol_type = other RNA
acatcagtgcctcagggacc

SEQ ID NO: 9180 - RNA, 20 nt, synthetic construct
  source 1..20: mol_type = other RNA
gggacctcccggagcaggct

SEQ ID NO: 9181 - RNA, 20 nt, synthetic construct
  source 1..20: mol_type = other RNA
cggagcaggctaatatcaga

SEQ ID NO: 9182 - RNA, 20 nt, synthetic construct
  source 1..20: mol_type = other RNA
gggaggtccctgaggcactg

SEQ ID NO: 9183 - RNA, 20 nt, synthetic construct
  source 1..20: mol_type = other RNA
gatattagcctgctccggga

SEQ ID NO: 9184 - RNA, 20 nt, synthetic construct
  source 1..20: mol_type = other RNA
tggtctctgatattagcctg

SEQ ID NO: 9185 - RNA, 20 nt, synthetic construct
  source 1..20: mol_type = other RNA
gccagtgtccctcttggtct

SEQ ID NO: 9186 - RNA, 20 nt, synthetic construct
  source 1..20: mol_type = other RNA
gtgatcctctgccagtgtcc

SEQ ID NO: 9187 - RNA, 20 nt, synthetic construct
  source 1..20: mol_type = other RNA
gtccctgcctggactggggt

SEQ ID NO: 9188 - RNA, 20 nt, synthetic construct
  source 1..20: mol_type = other RNA
gttggaacaagttgattctc

SEQ ID NO: 9189 - RNA, 20 nt, synthetic construct
  source 1..20: mol_type = other RNA
gcagtcctggaggccagaag

SEQ ID NO: 9190 - RNA, 20 nt, synthetic construct
  source 1..20: mol_type = other RNA
aggactgcagagaatcaact

SEQ ID NO: 9191 - RNA, 20 nt, synthetic construct
  source 1..20: mol_type = other RNA
cggggggctccagggagaag

SEQ ID NO: 9192 - RNA, 20 nt, synthetic construct
  source 1..20: mol_type = other RNA
agggagaagcttctcttgcc

SEQ ID NO: 9193 - RNA, 20 nt, synthetic construct
  source 1..20: mol_type = other RNA
ctggagccccccgggagaaa

SEQ ID NO: 9194 - RNA, 20 nt, synthetic construct
  source 1..20: mol_type = other RNA
tgcctcttccgtgtcccaac

SEQ ID NO: 9195 - RNA, 20 nt, synthetic construct
  source 1..20: mol_type = other RNA
tccgtgtcccaacagcggca

SEQ ID NO: 9196 - RNA, 20 nt, synthetic construct
  source 1..20: mol_type = other RNA
gtcttcacacagccttctct

SEQ ID NO: 9197 - RNA, 20 nt, synthetic construct
  source 1..20: mol_type = other RNA
gtgtctctctcctcttcatt

SEQ ID NO: 9198 - RNA, 20 nt, synthetic construct
  source 1..20: mol_type = other RNA
ctcctcttcattgtctcata

SEQ ID NO: 9199 - RNA, 20 nt, synthetic construct
  source 1..20: mol_type = other RNA
cctcttcattgtctcataag

SEQ ID NO: 9200 - RNA, 20 nt, synthetic construct
  source 1..20: mol_type = other RNA
tcttcattgtctcataagga

SEQ ID NO: 9201 - RNA, 20 nt, synthetic construct
  source 1..20: mol_type = other RNA
tcattgtctcataaggacac

SEQ ID NO: 9202 - RNA, 20 nt, synthetic construct
  source 1..20: mol_type = other RNA
taaggacacttgtcattgga

SEQ ID NO: 9203 - RNA, 20 nt, synthetic construct
  source 1..20: mol_type = other RNA
aggatgatctcatgtgggga

SEQ ID NO: 9204 - RNA, 20 nt, synthetic construct
  source 1..20: mol_type = other RNA
tgtggggaaccttaaccaca

SEQ ID NO: 9205 - RNA, 20 nt, synthetic construct
  source 1..20: mol_type = other RNA
catcctaacccccacaacct

SEQ ID NO: 9206 - RNA, 20 nt, synthetic construct
  source 1..20: mol_type = other RNA
ttggcagccactgttccctc

SEQ ID NO: 9207 - RNA, 20 nt, synthetic construct
  source 1..20: mol_type = other RNA
tctcccttgggccagaagca

SEQ ID NO: 9208 - RNA, 20 nt, synthetic construct
  source 1..20: mol_type = other RNA
cccttgggccagaagcagac

SEQ ID NO: 9209 - RNA, 20 nt, synthetic construct
  source 1..20: mol_type = other RNA
cttgggccagaagcagacgt

SEQ ID NO: 9210 - RNA, 20 nt, synthetic construct
  source 1..20: mol_type = other RNA
ggggaagcgggaaggggggc

SEQ ID NO: 9211 - RNA, 20 nt, synthetic construct
  source 1..20: mol_type = other RNA
cacagacactcgggggaagc

SEQ ID NO: 9212 - RNA, 20 nt, synthetic construct
  source 1..20: mol_type = other RNA
agaaggggttccacacccct

SEQ ID NO: 9213 - RNA, 20 nt, synthetic construct
  source 1..20: mol_type = other RNA
agccaagcccttgatatgac

SEQ ID NO: 9214 - RNA, 20 nt, synthetic construct
  source 1..20: mol_type = other RNA
tggagctgttgggctggcat

SEQ ID NO: 9215 - RNA, 20 nt, synthetic construct
  source 1..20: mol_type = other RNA
aggaggacttcctccagcca

SEQ ID NO: 9216 - RNA, 20 nt, synthetic construct
  source 1..20: mol_type = other RNA
ccatgaatgaagaagctgct

SEQ ID NO: 9217 - RNA, 20 nt, synthetic construct
  source 1..20: mol_type = other RNA
agggcccatgcttgtggcct

SEQ ID NO: 9218 - RNA, 20 nt, synthetic construct
  source 1..20: mol_type = other RNA
aacccagaccctgcactctt

SEQ ID NO: 9219 - RNA, 20 nt, synthetic construct
  source 1..20: mol_type = other RNA
taactgtgtgaccttgcata

SEQ ID NO: 9220 - RNA, 20 nt, synthetic construct
  source 1..20: mol_type = other RNA
ccctctctgatcttcaggtt

SEQ ID NO: 9221 - RNA, 20 nt, synthetic construct
  source 1..20: mol_type = other RNA
ctgatcttcaggttcctctg

SEQ ID NO: 9222 - RNA, 20 nt, synthetic construct
  source 1..20: mol_type = other RNA
gatcttcaggttcctctgca

SEQ ID NO: 9223 - RNA, 20 nt, synthetic construct
  source 1..20: mol_type = other RNA
gcaaaagggaggtaatgata

SEQ ID NO: 9224 - RNA, 20 nt, synthetic construct
  source 1..20: mol_type = other RNA
cttttgcagaggaacctgaa

SEQ ID NO: 9225 - RNA, 20 nt, synthetic construct
  source 1..20: mol_type = other RNA
ctctggggggctgtttggag

SEQ ID NO: 9226 - RNA, 20 nt, synthetic construct
  source 1..20: mol_type = other RNA
ggggggctgtttggagggtt

SEQ ID NO: 9227 - RNA, 20 nt, synthetic construct
  source 1..20: mol_type = other RNA
aaacagccccccagagtgag

SEQ ID NO: 9228 - RNA, 20 nt, synthetic construct
  source 1..20: mol_type = other RNA
gtcaggtattgagtgaggtg

SEQ ID NO: 9229 - RNA, 20 nt, synthetic construct
  source 1..20: mol_type = other RNA
atacctgacagagaaatgca

SEQ ID NO: 9230 - RNA, 20 nt, synthetic construct
  source 1..20: mol_type = other RNA
ctcaatacctgacagagaaa

SEQ ID NO: 9231 - RNA, 20 nt, synthetic construct
  source 1..20: mol_type = other RNA
aaacgttattattgaatggt

SEQ ID NO: 9232 - RNA, 20 nt, synthetic construct
  source 1..20: mol_type = other RNA
tcccccaacagtgtatccag

SEQ ID NO: 9233 - RNA, 20 nt, synthetic construct
  source 1..20: mol_type = other RNA
gcctatccagaactaatctg

SEQ ID NO: 9234 - RNA, 20 nt, synthetic construct
  source 1..20: mol_type = other RNA
cagcctatccagaactaatc

SEQ ID NO: 9235 - RNA, 20 nt, synthetic construct
  source 1..20: mol_type = other RNA
gaaggagtgcaggcagctgc

SEQ ID NO: 9236 - RNA, 20 nt, synthetic construct
  source 1..20: mol_type = other RNA
ttcagagctctcagcctatc

SEQ ID NO: 9237 - RNA, 20 nt, synthetic construct
  source 1..20: mol_type = other RNA
cagctgcctgcactccttca

SEQ ID NO: 9238 - RNA, 20 nt, synthetic construct
  source 1..20: mol_type = other RNA
aggaatcctttcctgatcct

SEQ ID NO: 9239 - RNA, 20 nt, synthetic construct
  source 1..20: mol_type = other RNA
cagcttcaatccacgttcat

SEQ ID NO: 9240 - RNA, 20 nt, synthetic construct
  source 1..20: mol_type = other RNA
tgcctcacagcttcaatcca

SEQ ID NO: 9241 - RNA, 20 nt, synthetic construct
  source 1..20: mol_type = other RNA
ctcctgcctcacagcttcaa

SEQ ID NO: 9242 - RNA, 20 nt, synthetic construct
  source 1..20: mol_type = other RNA
gtcccttctgcacaggccac

SEQ ID NO: 9243 - RNA, 20 nt, synthetic construct
  source 1..20: mol_type = other RNA
ccagcctcggtcccttctgc

SEQ ID NO: 9244 - RNA, 20 nt, synthetic construct
  source 1..20: mol_type = other RNA
tggtctcaccagcctcggtc

SEQ ID NO: 9245 - RNA, 20 nt, synthetic construct
  source 1..20: mol_type = other RNA
aggtcagatgtgaaaggaag

SEQ ID NO: 9246 - RNA, 20 nt, synthetic construct
  source 1..20: mol_type = other RNA
gactgtggccaagttcttcc

SEQ ID NO: 9247 - RNA, 20 nt, synthetic construct
  source 1..20: mol_type = other RNA
ggcgtatggcagggctgcct

SEQ ID NO: 9248 - RNA, 20 nt, synthetic construct
  source 1..20: mol_type = other RNA
ccaggcagccctgccatacg

SEQ ID NO: 9249 - RNA, 20 nt, synthetic construct
  source 1..20: mol_type = other RNA
caccaggcagccctgccata

SEQ ID NO: 9250 - RNA, 20 nt, synthetic construct
  source 1..20: mol_type = other RNA
ttccctctcaccaggcagcc

SEQ ID NO: 9251 - RNA, 20 nt, synthetic construct
  source 1..20: mol_type = other RNA
ctgctctggaggtatgcaag

SEQ ID NO: 9252 - RNA, 20 nt, synthetic construct
  source 1..20: mol_type = other RNA
ggaggtatgcaagcaggact

SEQ ID NO: 9253 - RNA, 20 nt, synthetic construct
  source 1..20: mol_type = other RNA
agagcagggagctcattccc

SEQ ID NO: 9254 - RNA, 20 nt, synthetic construct
  source 1..20: mol_type = other RNA
cacctgccagaggccacaga

SEQ ID NO: 9255 - RNA, 20 nt, synthetic construct
  source 1..20: mol_type = other RNA
cctgccagaggccacagagc

SEQ ID NO: 9256 - RNA, 20 nt, synthetic construct
  source 1..20: mol_type = other RNA
ggcaggtgagagcccagtcc

SEQ ID NO: 9257 - RNA, 20 nt, synthetic construct
  source 1..20: mol_type = other RNA
gtggcctctggcaggtgaga

SEQ ID NO: 9258 - RNA, 20 nt, synthetic construct
  source 1..20: mol_type = other RNA
ggaaagctctgtggcctctg

SEQ ID NO: 9259 - RNA, 20 nt, synthetic construct
  source 1..20: mol_type = other RNA
tccagcctctggaaagctct

SEQ ID NO: 9260 - RNA, 20 nt, synthetic construct
  source 1..20: mol_type = other RNA
aaggcctctttgcccctgag

SEQ ID NO: 9261 - RNA, 20 nt, synthetic construct
  source 1..20: mol_type = other RNA
ttgcccctgagagtggtggc

SEQ ID NO: 9262 - RNA, 20 nt, synthetic construct
  source 1..20: mol_type = other RNA
ggggcaaagaggccttggag

SEQ ID NO: 9263 - RNA, 20 nt, synthetic construct
  source 1..20: mol_type = other RNA
caggggcaaagaggccttgg

SEQ ID NO: 9264 - RNA, 20 nt, synthetic construct
  source 1..20: mol_type = other RNA
tcttgaggccaccttgccac

SEQ ID NO: 9265 - RNA, 20 nt, synthetic construct
  source 1..20: mol_type = other RNA
agaagagccaccactctcag

SEQ ID NO: 9266 - RNA, 20 nt, synthetic construct
  source 1..20: mol_type = other RNA
cccgggggtttggaagatag

SEQ ID NO: 9267 - RNA, 20 nt, synthetic construct
  source 1..20: mol_type = other RNA
atcttccaaacccccgggtg

SEQ ID NO: 9268 - RNA, 20 nt, synthetic construct
  source 1..20: mol_type = other RNA
ctctatcttccaaacccccg

SEQ ID NO: 9269 - RNA, 20 nt, synthetic construct
  source 1..20: mol_type = other RNA
tccgagctgggcccctttcc

SEQ ID NO: 9270 - RNA, 20 nt, synthetic construct
  source 1..20: mol_type = other RNA
gatgagacacagggcccttc

SEQ ID NO: 9271 - RNA, 20 nt, synthetic construct
  source 1..20: mol_type = other RNA
cactggaaggaagcccaagg

SEQ ID NO: 9272 - RNA, 20 nt, synthetic construct
  source 1..20: mol_type = other RNA
ctggaaggaagcccaaggat

SEQ ID NO: 9273 - RNA, 20 nt, synthetic construct
  source 1..20: mol_type = other RNA
gctggccatgcttgcagcct

SEQ ID NO: 9274 - RNA, 20 nt, synthetic construct
  source 1..20: mol_type = other RNA
tgaccctgtcccagcaggac

SEQ ID NO: 9275 - RNA, 20 nt, synthetic construct
  source 1..20: mol_type = other RNA
caccagcccactgtcctgct

SEQ ID NO: 9276 - RNA, 20 nt, synthetic construct
  source 1..20: mol_type = other RNA
ccgagcttccatctgccgct

SEQ ID NO: 9277 - RNA, 20 nt, synthetic construct
  source 1..20: mol_type = other RNA
gggaggcagccccacacctt

SEQ ID NO: 9278 - RNA, 20 nt, synthetic construct
  source 1..20: mol_type = other RNA
tggagcagatggtggtccca

SEQ ID NO: 9279 - RNA, 20 nt, synthetic construct
  source 1..20: mol_type = other RNA
aggagctgtacctgggttct

SEQ ID NO: 9280 - RNA, 20 nt, synthetic construct
  source 1..20: mol_type = other RNA
cacctgggctaactcagctg

SEQ ID NO: 9281 - RNA, 20 nt, synthetic construct
  source 1..20: mol_type = other RNA
cctgggctaactcagctgca

SEQ ID NO: 9282 - RNA, 20 nt, synthetic construct
  source 1..20: mol_type = other RNA
gctgcagcctcagttccctc

SEQ ID NO: 9283 - RNA, 20 nt, synthetic construct
  source 1..20: mol_type = other RNA
gttccctcctcacacacgac

SEQ ID NO: 9284 - RNA, 20 nt, synthetic construct
  source 1..20: mol_type = other RNA
tcacacacgacgaggaacat

SEQ ID NO: 9285 - RNA, 20 nt, synthetic construct
  source 1..20: mol_type = other RNA
cacacgacgaggaacatgga

SEQ ID NO: 9286 - RNA, 20 nt, synthetic construct
  source 1..20: mol_type = other RNA
tcgtgtgtgaggagggaact

SEQ ID NO: 9287 - RNA, 20 nt, synthetic construct
  source 1..20: mol_type = other RNA
atgtgcgttgtgtggcttac

SEQ ID NO: 9288 - RNA, 20 nt, synthetic construct
  source 1..20: mol_type = other RNA
ctggacgtaagccacacaac

SEQ ID NO: 9289 - RNA, 20 nt, synthetic construct
  source 1..20: mol_type = other RNA
gtgctgtcttctagataagc

SEQ ID NO: 9290 - RNA, 20 nt, synthetic construct
  source 1..20: mol_type = other RNA
gagggaaaaccttgggctgc

SEQ ID NO: 9291 - RNA, 20 nt, synthetic construct
  source 1..20: mol_type = other RNA
gagcttccaggctgacggga

SEQ ID NO: 9292 - RNA, 20 nt, synthetic construct
  source 1..20: mol_type = other RNA
ggaagcagcccaaggttttc

SEQ ID NO: 9293 - RNA, 20 nt, synthetic construct
  source 1..20: mol_type = other RNA
gctaggagcagactgagcat

SEQ ID NO: 9294 - RNA, 20 nt, synthetic construct
  source 1..20: mol_type = other RNA
tagcagaggccccgggctgg

SEQ ID NO: 9295 - RNA, 20 nt, synthetic construct
  source 1..20: mol_type = other RNA
gtctgctcctagcagaggcc

SEQ ID NO: 9296 - RNA, 20 nt, synthetic construct
  source 1..20: mol_type = other RNA
gcccaccttgctggccttgt

SEQ ID NO: 9297 - RNA, 20 nt, synthetic construct
  source 1..20: mol_type = other RNA
atatctagtggttcctctag

SEQ ID NO: 9298 - RNA, 20 nt, synthetic construct
  source 1..20: mol_type = other RNA
agggtggcgagcactgtttg

SEQ ID NO: 9299 - RNA, 20 nt, synthetic construct
  source 1..20: mol_type = other RNA
ccaccctagaggaaccacta

SEQ ID NO: 9300 - RNA, 20 nt, synthetic construct
  source 1..20: mol_type = other RNA
agatgtcttcaggtcggagc

SEQ ID NO: 9301 - RNA, 20 nt, synthetic construct
  source 1..20: mol_type = other RNA
gacctgaagacatctggaga

SEQ ID NO: 9302 - RNA, 20 nt, synthetic construct
  source 1..20: mol_type = other RNA
cagcgctctcagccacccct

SEQ ID NO: 9303 - RNA, 20 nt, synthetic construct
  source 1..20: mol_type = other RNA
cagccaccccttcccagtgt

SEQ ID NO: 9304 - RNA, 20 nt, synthetic construct
  source 1..20: mol_type = other RNA
gccaccccttcccagtgtag

SEQ ID NO: 9305 - RNA, 20 nt, synthetic construct
  source 1..20: mol_type = other RNA
tcaataggcatctaccatgt

SEQ ID NO: 9306 - RNA, 20 nt, synthetic construct
  source 1..20: mol_type = other RNA
taacacactcagagagcaag

SEQ ID NO: 9307 - RNA, 20 nt, synthetic construct
  source 1..20: mol_type = other RNA
gagagcaaggactccgcctc

SEQ ID NO: 9308 - RNA, 20 nt, synthetic construct
  source 1..20: mol_type = other RNA
gagtgtgttaggagctttca

SEQ ID NO: 9309 - RNA, 20 nt, synthetic construct
  source 1..20: mol_type = other RNA
ctgagtgtgttaggagcttt

SEQ ID NO: 9310 - RNA, 20 nt, synthetic construct
  source 1..20: mol_type = other RNA
gcctcatcccacagcctggg

SEQ ID NO: 9311 - RNA, 20 nt, synthetic construct
  source 1..20: mol_type = other RNA
tcccacagcctgggaggaga

SEQ ID NO: 9312 - RNA, 20 nt, synthetic construct
  source 1..20: mol_type = other RNA
caggctgtgggatgaggcgg

SEQ ID NO: 9313 - RNA, 20 nt, synthetic construct
  source 1..20: mol_type = other RNA
tcccaggctgtgggatgagg

SEQ ID NO: 9314 - RNA, 20 nt, synthetic construct
  source 1..20: mol_type = other RNA
cctcccaggctgtgggatga

SEQ ID NO: 9315 - RNA, 20 nt, synthetic construct
  source 1..20: mol_type = other RNA
gcatgctacagaagaaacca

SEQ ID NO: 9316 - RNA, 20 nt, synthetic construct
  source 1..20: mol_type = other RNA
actgatcagtcccgtgggca

SEQ ID NO: 9317 - RNA, 20 nt, synthetic construct
  source 1..20: mol_type = other RNA
gcaggaagctccactgatca

SEQ ID NO: 9318 - RNA, 20 nt, synthetic construct
  source 1..20: mol_type = other RNA
agtctcggcaggaagctcca

SEQ ID NO: 9319 - RNA, 20 nt, synthetic construct
  source 1..20: mol_type = other RNA
cagttcggactgtgcccaga

SEQ ID NO: 9320 - RNA, 20 nt, synthetic construct
  source 1..20: mol_type = other RNA
cacccacccactatgctagt

SEQ ID NO: 9321 - RNA, 20 nt, synthetic construct
  source 1..20: mol_type = other RNA
gagcagccactgaattgctc

SEQ ID NO: 9322 - RNA, 20 nt, synthetic construct
  source 1..20: mol_type = other RNA
gagatcccacatgaatttca

SEQ ID NO: 9323 - RNA, 20 nt, synthetic construct
  source 1..20: mol_type = other RNA
gtagggggctaaatagtggc

SEQ ID NO: 9324 - RNA, 20 nt, synthetic construct
  source 1..20: mol_type = other RNA
gtctgggtgtgtgtatctgt

SEQ ID NO: 9325 - RNA, 20 nt, synthetic construct
  source 1..20: mol_type = other RNA
caggctctgtctgggtgtgt

SEQ ID NO: 9326 - RNA, 20 nt, synthetic construct
  source 1..20: mol_type = other RNA
aaataaggtctggctcacag

SEQ ID NO: 9327 - RNA, 20 nt, synthetic construct
  source 1..20: mol_type = other RNA
agatggcatcatctggatta

SEQ ID NO: 9328 - RNA, 20 nt, synthetic construct
  source 1..20: mol_type = other RNA
taaagacacatcacaggact

SEQ ID NO: 9329 - RNA, 20 nt, synthetic construct
  source 1..20: mol_type = other RNA
cataaagacacatcacagga

SEQ ID NO: 9330 - RNA, 20 nt, synthetic construct
  source 1..20: mol_type = other RNA
gcctttctctcataaagaca

SEQ ID NO: 9331 - RNA, 20 nt, synthetic construct
  source 1..20: mol_type = other RNA
ctctgcctttctctcataaa

SEQ ID NO: 9332 - RNA, 20 nt, synthetic construct
  source 1..20: mol_type = other RNA
tgtgtgtgtcaaatctccct

SEQ ID NO: 9333 - RNA, 20 nt, synthetic construct
  source 1..20: mol_type = other RNA
acgtggcccctcctgtgtgt

SEQ ID NO: 9334 - RNA, 20 nt, synthetic construct
  source 1..20: mol_type = other RNA
gtctccacgtggcccctcct

SEQ ID NO: 9335 - RNA, 20 nt, synthetic construct
  source 1..20: mol_type = other RNA
acctctgtctccacgtggcc

SEQ ID NO: 9336 - RNA, 20 nt, synthetic construct
  source 1..20: mol_type = other RNA
aatctccacctctgtctcca

SEQ ID NO: 9337 - RNA, 20 nt, synthetic construct
  source 1..20: mol_type = other RNA
cgtcttccggcttctggtgg

SEQ ID NO: 9338 - RNA, 20 nt, synthetic construct
  source 1..20: mol_type = other RNA
gggaagaaccctgcctcacg

SEQ ID NO: 9339 - RNA, 20 nt, synthetic construct
  source 1..20: mol_type = other RNA
gcagcgaaggctctgggaag

SEQ ID NO: 9340 - RNA, 20 nt, synthetic construct
  source 1..20: mol_type = other RNA
gggcgtgtacccacttctta

SEQ ID NO: 9341 - RNA, 20 nt, synthetic construct
  source 1..20: mol_type = other RNA
cacacttgctcacctgtcct

SEQ ID NO: 9342 - RNA, 20 nt, synthetic construct
  source 1..20: mol_type = other RNA
cctgtcctgagatgagaatc

SEQ ID NO: 9343 - RNA, 20 nt, synthetic construct
  source 1..20: mol_type = other RNA
ggacaggtgagcaagtgtgg

SEQ ID NO: 9344 - RNA, 20 nt, synthetic construct
  source 1..20: mol_type = other RNA
tctcaggacaggtgagcaag

SEQ ID NO: 9345 - RNA, 20 nt, synthetic construct
  source 1..20: mol_type = other RNA
actctgcagcatatttggag

SEQ ID NO: 9346 - RNA, 20 nt, synthetic construct
  source 1..20: mol_type = other RNA
gcagcatatttggaggatca

SEQ ID NO: 9347 - RNA, 20 nt, synthetic construct
  source 1..20: mol_type = other RNA
aaatatgctgcagagtagag

SEQ ID NO: 9348 - RNA, 20 nt, synthetic construct
  source 1..20: mol_type = other RNA
gtggcccccgcagtgatcct

SEQ ID NO: 9349 - RNA, 20 nt, synthetic construct
  source 1..20: mol_type = other RNA
ggagaccctggggcaggagc

SEQ ID NO: 9350 - RNA, 20 nt, synthetic construct
  source 1..20: mol_type = other RNA
tgagtcttctgaagtgccat

SEQ ID NO: 9351 - RNA, 20 nt, synthetic construct
  source 1..20: mol_type = other RNA
tgccccagggtctcctgagt

SEQ ID NO: 9352 - RNA, 20 nt, synthetic construct
  source 1..20: mol_type = other RNA
gggctgtcagtcaaactgct

SEQ ID NO: 9353 - RNA, 20 nt, synthetic construct
  source 1..20: mol_type = other RNA
gattccacctgaggccctgc

SEQ ID NO: 9354 - RNA, 20 nt, synthetic construct
  source 1..20: mol_type = other RNA
ggtggaatcagagggcagcc

SEQ ID NO: 9355 - RNA, 20 nt, synthetic construct
  source 1..20: mol_type = other RNA
gctagcagcaacctgcctga

SEQ ID NO: 9356 - RNA, 20 nt, synthetic construct
  source 1..20: mol_type = other RNA
gccaggccaaaggaagactt

SEQ ID NO: 9357 - RNA, 20 nt, synthetic construct
  source 1..20: mol_type = other RNA
cagccaggccaaaggaagac

SEQ ID NO: 9358 - RNA, 20 nt, synthetic construct
  source 1..20: mol_type = other RNA
gaaactctcagccaggccaa

SEQ ID NO: 9359 - RNA, 20 nt, synthetic construct
  source 1..20: mol_type = other RNA
agcgcaggtctcagaaactc

SEQ ID NO: 9360 - RNA, 20 nt, synthetic construct
  source 1..20: mol_type = other RNA
gctccagcgcaggtctcaga

SEQ ID NO: 9361 - RNA, 20 nt, synthetic construct
  source 1..20: mol_type = other RNA
ctcccttctccatccagcag

SEQ ID NO: 9362 - RNA, 20 nt, synthetic construct
  source 1..20: mol_type = other RNA
cccttctccatccagcaggc

SEQ ID NO: 9363 - RNA, 20 nt, synthetic construct
  source 1..20: mol_type = other RNA
cttctccatccagcaggctg

SEQ ID NO: 9364 - RNA, 20 nt, synthetic construct
  source 1..20: mol_type = other RNA
atccagcaggctggacctgc

SEQ ID NO: 9365 - RNA, 20 nt, synthetic construct
  source 1..20: mol_type = other RNA
cagatgccaggcaggtccag

SEQ ID NO: 9366 - RNA, 20 nt, synthetic construct
  source 1..20: mol_type = other RNA
ccctactttctcctataccc

SEQ ID NO: 9367 - RNA, 20 nt, synthetic construct
  source 1..20: mol_type = other RNA
ctactttctcctatacccta

SEQ ID NO: 9368 - RNA, 20 nt, synthetic construct
  source 1..20: mol_type = other RNA
tataccctaacctttgtcct

SEQ ID NO: 9369 - RNA, 20 nt, synthetic construct
  source 1..20: mol_type = other RNA
cccagtgagtctcttgcagc

SEQ ID NO: 9370 - RNA, 20 nt, synthetic construct
  source 1..20: mol_type = other RNA
ctgggggagtcgcccatgca

SEQ ID NO: 9371 - RNA, 20 nt, synthetic construct
  source 1..20: mol_type = other RNA
tgcagcttttaccccagtgc

SEQ ID NO: 9372 - RNA, 20 nt, synthetic construct
  source 1..20: mol_type = other RNA
aagaagcaggcactggggta

SEQ ID NO: 9373 - RNA, 20 nt, synthetic construct
  source 1..20: mol_type = other RNA
gtgactgttttctctgaggt

SEQ ID NO: 9374 - RNA, 20 nt, synthetic construct
  source 1..20: mol_type = other RNA
gaggttgtgactcgtgtgag

SEQ ID NO: 9375 - RNA, 20 nt, synthetic construct
  source 1..20: mol_type = other RNA
gagaaaacagtcaccgagcg

SEQ ID NO: 9376 - RNA, 20 nt, synthetic construct
  source 1..20: mol_type = other RNA
tgtgaggcagaagcagtccc

SEQ ID NO: 9377 - RNA, 20 nt, synthetic construct
  source 1..20: mol_type = other RNA
cacgagtcacaacctcagag

SEQ ID NO: 9378 - RNA, 20 nt, synthetic construct
  source 1..20: mol_type = other RNA
cggggactgcttctgcctca

SEQ ID NO: 9379 - RNA, 20 nt, synthetic construct
  source 1..20: mol_type = other RNA
tggtatcttgtggagtggag

SEQ ID NO: 9380 - RNA, 20 nt, synthetic construct
  source 1..20: mol_type = other RNA
acaagataccaggagggctc

SEQ ID NO: 9381 - RNA, 20 nt, synthetic construct
  source 1..20: mol_type = other RNA
actccacaagataccaggag

SEQ ID NO: 9382 - RNA, 20 nt, synthetic construct
  source 1..20: mol_type = other RNA
aggtccaagcgttctccact

SEQ ID NO: 9383 - RNA, 20 nt, synthetic construct
  source 1..20: mol_type = other RNA
tggctccaggtccaagcgtt

SEQ ID NO: 9384 - RNA, 20 nt, synthetic construct
  source 1..20: mol_type = other RNA
gacaggatgtatgtctgggc

SEQ ID NO: 9385 - RNA, 20 nt, synthetic construct
  source 1..20: mol_type = other RNA
aaaatgagccggccagcgca

SEQ ID NO: 9386 - RNA, 20 nt, synthetic construct
  source 1..20: mol_type = other RNA
ttttagagacaggaagctgc

SEQ ID NO: 9387 - RNA, 20 nt, synthetic construct
  source 1..20: mol_type = other RNA
tttgagtctttaaatcttgt

SEQ ID NO: 9388 - RNA, 20 nt, synthetic construct
  source 1..20: mol_type = other RNA
aaggagaataacagtgatgt

SEQ ID NO: 9389 - RNA, 20 nt, synthetic construct
  source 1..20: mol_type = other RNA
gtgagctgtgaaaggctata

SEQ ID NO: 9390 - RNA, 20 nt, synthetic construct
  source 1..20: mol_type = other RNA
ccgagtctgcaagaaagaca

SEQ ID NO: 9391 - RNA, 20 nt, synthetic construct
  source 1..20: mol_type = other RNA
ttcatatgaatatcaatatc

SEQ ID NO: 9392 - RNA, 20 nt, synthetic construct
  source 1..20: mol_type = other RNA
ctaggcctccctttccttgt

SEQ ID NO: 9393 - RNA, 20 nt, synthetic construct
  source 1..20: mol_type = other RNA
aggcctccctttccttgtct

SEQ ID NO: 9394 - RNA, 20 nt, synthetic construct
  source 1..20: mol_type = other RNA
ctttccttgtctatgaaata

SEQ ID NO: 9395 - RNA, 20 nt, synthetic construct
  source 1..20: mol_type = other RNA
cacactacatcctattctat

SEQ ID NO: 9396 - RNA, 20 nt, synthetic construct
  source 1..20: mol_type = other RNA
aaaaaatcctcacacactac

SEQ ID NO: 9397 - RNA, 20 nt, synthetic construct
  source 1..20: mol_type = other RNA
tttaacctccaaaaaatcct

SEQ ID NO: 9398 - RNA, 20 nt, synthetic construct
  source 1..20: mol_type = other RNA
gtagtttctgtgtgttaact

SEQ ID NO: 9399 - RNA, 20 nt, synthetic construct
  source 1..20: mol_type = other RNA
ttccctcctctcccacaaat

SEQ ID NO: 9400 - RNA, 20 nt, synthetic construct
  source 1..20: mol_type = other RNA
tctcccacaaatgtcgcctt

SEQ ID NO: 9401 - RNA, 20 nt, synthetic construct
  source 1..20: mol_type = other RNA
cccacaaatgtcgccttgga

SEQ ID NO: 9402 - RNA, 20 nt, synthetic construct
  source 1..20: mol_type = other RNA
cacaaatgtcgccttggaaa

SEQ ID NO: 9403 - RNA, 20 nt, synthetic construct
  source 1..20: mol_type = other RNA
gtctttccaaggcgacattt

SEQ ID NO: 9404 - RNA, 20 nt, synthetic construct
  source 1..20: mol_type = other RNA
accaggctgcctccgtcttt

SEQ ID NO: 9405 - RNA, 20 nt, synthetic construct
  source 1..20: mol_type = other RNA
tagacaccagcatacagagt

SEQ ID NO: 9406 - RNA, 20 nt, synthetic construct
  source 1..20: mol_type = other RNA
gtatgctggtgtctaggaga

SEQ ID NO: 9407 - RNA, 20 nt, synthetic construct
  source 1..20: mol_type = other RNA
atttcccggtggtcactctg

SEQ ID NO: 9408 - RNA, 20 nt, synthetic construct
  source 1..20: mol_type = other RNA
aagtcggtgaccatgaccct

SEQ ID NO: 9409 - RNA, 20 nt, synthetic construct
  source 1..20: mol_type = other RNA
ggcacattctcgaagtcggt

SEQ ID NO: 9410 - RNA, 20 nt, synthetic construct
  source 1..20: mol_type = other RNA
tcgggcacattctcgaagtc

SEQ ID NO: 9411 - RNA, 20 nt, synthetic construct
  source 1..20: mol_type = other RNA
catcagacggccgtgcttac

SEQ ID NO: 9412 - RNA, 20 nt, synthetic construct
  source 1..20: mol_type = other RNA
gcccatatccccatcctgga

SEQ ID NO: 9413 - RNA, 20 nt, synthetic construct
  source 1..20: mol_type = other RNA
aggatggggatatgggcaga

SEQ ID NO: 9414 - RNA, 20 nt, synthetic construct
  source 1..20: mol_type = other RNA
ggggtggcagtccccaccca

SEQ ID NO: 9415 - RNA, 20 nt, synthetic construct
  source 1..20: mol_type = other RNA
tgggttgcaccccccccagc

SEQ ID NO: 9416 - RNA, 20 nt, synthetic construct
  source 1..20: mol_type = other RNA
ctgccatcagttgtgggaag

SEQ ID NO: 9417 - RNA, 20 nt, synthetic construct
  source 1..20: mol_type = other RNA
accctataacaaatcagcag

SEQ ID NO: 9418 - RNA, 20 nt, synthetic construct
  source 1..20: mol_type = other RNA
tgtggtccttgtgttcgtcg

SEQ ID NO: 9419 - RNA, 20 nt, synthetic construct
  source 1..20: mol_type = other RNA
acgaacacaaggaccacatg

SEQ ID NO: 9420 - RNA, 20 nt, synthetic construct
  source 1..20: mol_type = other RNA
actgccaagggaagggcacg

SEQ ID NO: 9421 - RNA, 20 nt, synthetic construct
  source 1..20: mol_type = other RNA
taggtaagtgatggccccag

SEQ ID NO: 9422 - RNA, 20 nt, synthetic construct
  source 1..20: mol_type = other RNA
ctccatctggacctggcctg

SEQ ID NO: 9423 - RNA, 20 nt, synthetic construct
  source 1..20: mol_type = other RNA
ccatctggacctggcctggg

SEQ ID NO: 9424 - RNA, 20 nt, synthetic construct
  source 1..20: mol_type = other RNA
atctggacctggcctgggag

SEQ ID NO: 9425 - RNA, 20 nt, synthetic construct
  source 1..20: mol_type = other RNA
caggccaggtccagatggag

SEQ ID NO: 9426 - RNA, 20 nt, synthetic construct
  source 1..20: mol_type = other RNA
ctgggcccagcccaagccac

SEQ ID NO: 9427 - RNA, 20 nt, synthetic construct
  source 1..20: mol_type = other RNA
ccctgggcccagcccaagcc

SEQ ID NO: 9428 - RNA, 20 nt, synthetic construct
  source 1..20: mol_type = other RNA
taaccaagaatgctgtggca

SEQ ID NO: 9429 - RNA, 20 nt, synthetic construct
  source 1..20: mol_type = other RNA
gccgcagagccagagaacca

SEQ ID NO: 9430 - RNA, 20 nt, synthetic construct
  source 1..20: mol_type = other RNA
gcggcagaggctgccacagc

SEQ ID NO: 9431 - RNA, 20 nt, synthetic construct
  source 1..20: mol_type = other RNA
ggctctgcggcagaggctgc

SEQ ID NO: 9432 - RNA, 20 nt, synthetic construct
  source 1..20: mol_type = other RNA
ggttctctggctctgcggca

SEQ ID NO: 9433 - RNA, 20 nt, synthetic construct
  source 1..20: mol_type = other RNA
tggccactgggaaccctgcc

SEQ ID NO: 9434 - RNA, 20 nt, synthetic construct
  source 1..20: mol_type = other RNA
tggggcctgggtttcttcat

SEQ ID NO: 9435 - RNA, 20 nt, synthetic construct
  source 1..20: mol_type = other RNA
ctgggctacctgcatgaccc

SEQ ID NO: 9436 - RNA, 20 nt, synthetic construct
  source 1..20: mol_type = other RNA
ccttttaaaatccggtgatg

SEQ ID NO: 9437 - RNA, 20 nt, synthetic construct
  source 1..20: mol_type = other RNA
acattgaagataacataaca

SEQ ID NO: 9438 - RNA, 20 nt, synthetic construct
  source 1..20: mol_type = other RNA
aggtgatctaagcaaacttt

SEQ ID NO: 9439 - RNA, 20 nt, synthetic construct
  source 1..20: mol_type = other RNA
agtccctccacattgaagat

SEQ ID NO: 9440 - RNA, 20 nt, synthetic construct
  source 1..20: mol_type = other RNA
gagaccaggggactcactca

SEQ ID NO: 9441 - RNA, 20 nt, synthetic construct
  source 1..20: mol_type = other RNA
gaggtatgcaagcagaagat

SEQ ID NO: 9442 - RNA, 20 nt, synthetic construct
  source 1..20: mol_type = other RNA
ctcacttgcatgactgggcc

SEQ ID NO: 9443 - RNA, 20 nt, synthetic construct
  source 1..20: mol_type = other RNA
cttgcatgactgggccctgc

SEQ ID NO: 9444 - RNA, 20 nt, synthetic construct
  source 1..20: mol_type = other RNA
accacatctgcctggccagt

SEQ ID NO: 9445 - RNA, 20 nt, synthetic construct
  source 1..20: mol_type = other RNA
gccagttcctccaccacatc

SEQ ID NO: 9446 - RNA, 20 nt, synthetic construct
  source 1..20: mol_type = other RNA
actggacttcataggggggc

SEQ ID NO: 9447 - RNA, 20 nt, synthetic construct
  source 1..20: mol_type = other RNA
gggggccggtggacagagaa

SEQ ID NO: 9448 - RNA, 20 nt, synthetic construct
  source 1..20: mol_type = other RNA
gtccaccggcccccagagtc

SEQ ID NO: 9449 - RNA, 20 nt, synthetic construct
  source 1..20: mol_type = other RNA
tctctgtccaccggccccca

SEQ ID NO: 9450 - RNA, 20 nt, synthetic construct
  source 1..20: mol_type = other RNA
ctcttctctgtccaccggcc

SEQ ID NO: 9451 - RNA, 20 nt, synthetic construct
  source 1..20: mol_type = other RNA
cccttactgacttccttctg

SEQ ID NO: 9452 - RNA, 20 nt, synthetic construct
  source 1..20: mol_type = other RNA
cttactgacttccttctgtg

SEQ ID NO: 9453 - RNA, 20 nt, synthetic construct
  source 1..20: mol_type = other RNA
atgtctggccacagaaggaa

SEQ ID NO: 9454 - RNA, 20 nt, synthetic construct
  source 1..20: mol_type = other RNA
gtacagcatgtcctggggct

SEQ ID NO: 9455 - RNA, 20 nt, synthetic construct
  source 1..20: mol_type = other RNA
ggactggtttcgtcaactat

SEQ ID NO: 9456 - RNA, 20 nt, synthetic construct
  source 1..20: mol_type = other RNA
ctggactggtttcgtcaact

SEQ ID NO: 9457 - RNA, 20 nt, synthetic construct
  source 1..20: mol_type = other RNA
cctctctggactggtttcgt

SEQ ID NO: 9458 - RNA, 20 nt, synthetic construct
  source 1..20: mol_type = other RNA
agctggggaactcgctggga

SEQ ID NO: 9459 - RNA, 20 nt, synthetic construct
  source 1..20: mol_type = other RNA
ctgggaaaactgtcagctct

SEQ ID NO: 9460 - RNA, 20 nt, synthetic construct
  source 1..20: mol_type = other RNA
gggcagcagcttgacttcca

SEQ ID NO: 9461 - RNA, 20 nt, synthetic construct
  source 1..20: mol_type = other RNA
ggtgctggcagaggcagccc

SEQ ID NO: 9462 - RNA, 20 nt, synthetic construct
  source 1..20: mol_type = other RNA
gccagcaccagagccagtgt

SEQ ID NO: 9463 - RNA, 20 nt, synthetic construct
  source 1..20: mol_type = other RNA
gcctttgaaacaggctagtg

SEQ ID NO: 9464 - RNA, 20 nt, synthetic construct
  source 1..20: mol_type = other RNA
tgggccttctcagcctttga

SEQ ID NO: 9465 - RNA, 20 nt, synthetic construct
  source 1..20: mol_type = other RNA
accagttctgccctgagact

SEQ ID NO: 9466 - RNA, 20 nt, synthetic construct
  source 1..20: mol_type = other RNA
gggcagaactggtggagcac

SEQ ID NO: 9467 - RNA, 20 nt, synthetic construct
  source 1..20: mol_type = other RNA
gtaggaaagtctcagggcag

SEQ ID NO: 9468 - RNA, 20 nt, synthetic construct
  source 1..20: mol_type = other RNA
gctcagtcaggtcagttcct

SEQ ID NO: 9469 - RNA, 20 nt, synthetic construct
  source 1..20: mol_type = other RNA
gtcaggtcagttcctgaagg

SEQ ID NO: 9470 - RNA, 20 nt, synthetic construct
  source 1..20: mol_type = other RNA
acacactgaccttcaggaac

SEQ ID NO: 9471 - RNA, 20 nt, synthetic construct
  source 1..20: mol_type = other RNA
cctccacacactgaccttca

SEQ ID NO: 9472 - RNA, 20 nt, synthetic construct
  source 1..20: mol_type = other RNA
ggcctctggaggacttcctg

SEQ ID NO: 9473 - RNA, 20 nt, synthetic construct
  source 1..20: mol_type = other RNA
ggaggacttcctggagaagt

SEQ ID NO: 9474 - RNA, 20 nt, synthetic construct
  source 1..20: mol_type = other RNA
agaggccagagcaccaggcc

SEQ ID NO: 9475 - RNA, 20 nt, synthetic construct
  source 1..20: mol_type = other RNA
aggaagtcctccagaggcca

SEQ ID NO: 9476 - RNA, 20 nt, synthetic construct
  source 1..20: mol_type = other RNA
acagtcactattgccttcct

SEQ ID NO: 9477 - RNA, 20 nt, synthetic construct
  source 1..20: mol_type = other RNA
tctgtaagcaggtgattgtg

SEQ ID NO: 9478 - RNA, 20 nt, synthetic construct
  source 1..20: mol_type = other RNA
gtaagcaggtgattgtgtgt

SEQ ID NO: 9479 - RNA, 20 nt, synthetic construct
  source 1..20: mol_type = other RNA
gactggacacacaatcacct

SEQ ID NO: 9480 - RNA, 20 nt, synthetic construct
  source 1..20: mol_type = other RNA
gtgctcagactggacacaca

SEQ ID NO: 9481 - RNA, 20 nt, synthetic construct
  source 1..20: mol_type = other RNA
tgcctgtaatcccagcactt

SEQ ID NO: 9482 - RNA, 20 nt, synthetic construct
  source 1..20: mol_type = other RNA
caaagtgctgggattacagg

SEQ ID NO: 9483 - RNA, 20 nt, synthetic construct
  source 1..20: mol_type = other RNA
gcctcccaaagtgctgggat

SEQ ID NO: 9484 - RNA, 20 nt, synthetic construct
  source 1..20: mol_type = other RNA
ggtgatctgcccacctcggc

SEQ ID NO: 9485 - RNA, 20 nt, synthetic construct
  source 1..20: mol_type = other RNA
tgacctcaggtgatctgccc

SEQ ID NO: 9486 - RNA, 20 nt, synthetic construct
  source 1..20: mol_type = other RNA
aactcctgacctcaggtgat

SEQ ID NO: 9487 - RNA, 20 nt, synthetic construct
  source 1..20: mol_type = other RNA
actaaaaatacaaaaattag

SEQ ID NO: 9488 - RNA, 20 nt, synthetic construct
  source 1..20: mol_type = other RNA
caagtagctgggatacagac

SEQ ID NO: 9489 - RNA, 20 nt, synthetic construct
  source 1..20: mol_type = other RNA
tgccttagcctcccaagtag

SEQ ID NO: 9490 - RNA, 20 nt, synthetic construct
  source 1..20: mol_type = other RNA
tgggttcaagcgattctcct

SEQ ID NO: 9491 - RNA, 20 nt, synthetic construct
  source 1..20: mol_type = other RNA
acctcctgggttcaagcgat

SEQ ID NO: 9492 - RNA, 20 nt, synthetic construct
  source 1..20: mol_type = other RNA
ctgcaacctccacctcctgg

SEQ ID NO: 9493 - RNA, 20 nt, synthetic construct
  source 1..20: mol_type = other RNA
gctcactgcaacctccacct

SEQ ID NO: 9494 - RNA, 20 nt, synthetic construct
  source 1..20: mol_type = other RNA
ggctggattgcagtggcacg

SEQ ID NO: 9495 - RNA, 20 nt, synthetic construct
  source 1..20: mol_type = other RNA
atcactcaggctggattgca

SEQ ID NO: 9496 - RNA, 20 nt, synthetic construct
  source 1..20: mol_type = other RNA
ctctatcactcaggctggat

SEQ ID NO: 9497 - RNA, 20 nt, synthetic construct
  source 1..20: mol_type = other RNA
aaaataaataagtaaataac

SEQ ID NO: 9498 - RNA, 20 nt, synthetic construct
  source 1..20: mol_type = other RNA
acactcagtgccactccact

SEQ ID NO: 9499 - RNA, 20 nt, synthetic construct
  source 1..20: mol_type = other RNA
gtgccactccactccctccc

SEQ ID NO: 9500 - RNA, 20 nt, synthetic construct
  source 1..20: mol_type = other RNA
actccctccctccgtggtgt

SEQ ID NO: 9501 - RNA, 20 nt, synthetic construct
  source 1..20: mol_type = other RNA
ctccctccgtggtgtgaggg

SEQ ID NO: 9502 - RNA, 20 nt, synthetic construct
  source 1..20: mol_type = other RNA
ctccgtggtgtgaggggcct

SEQ ID NO: 9503 - RNA, 20 nt, synthetic construct
  source 1..20: mol_type = other RNA
gtggtgtgaggggcctcact

SEQ ID NO: 9504 - RNA, 20 nt, synthetic construct
  source 1..20: mol_type = other RNA
caccacggagggagggagtg

SEQ ID NO: 9505 - RNA, 20 nt, synthetic construct
  source 1..20: mol_type = other RNA
ctagctgtctcctaggagga

SEQ ID NO: 9506 - RNA, 20 nt, synthetic construct
  source 1..20: mol_type = other RNA
taggaggagcatggctgtga

SEQ ID NO: 9507 - RNA, 20 nt, synthetic construct
  source 1..20: mol_type = other RNA
taggagacagctagtgaggc

SEQ ID NO: 9508 - RNA, 20 nt, synthetic construct
  source 1..20: mol_type = other RNA
tcctaggagacagctagtga

SEQ ID NO: 9509 - RNA, 20 nt, synthetic construct
  source 1..20: mol_type = other RNA
cagccatgctcctcctagga

SEQ ID NO: 9510 - RNA, 20 nt, synthetic construct
  source 1..20: mol_type = other RNA
atccttggccacggctcctg

SEQ ID NO: 9511 - RNA, 20 nt, synthetic construct
  source 1..20: mol_type = other RNA
tggagacatcttagaggcca

SEQ ID NO: 9512 - RNA, 20 nt, synthetic construct
  source 1..20: mol_type = other RNA
aggagccgtggccaaggatg

SEQ ID NO: 9513 - RNA, 20 nt, synthetic construct
  source 1..20: mol_type = other RNA
aagatgtctccaggagccgt

SEQ ID NO: 9514 - RNA, 20 nt, synthetic construct
  source 1..20: mol_type = other RNA
cacacctcatttgacagggg

SEQ ID NO: 9515 - RNA, 20 nt, synthetic construct
  source 1..20: mol_type = other RNA
tttgacaggggagaagctgt

SEQ ID NO: 9516 - RNA, 20 nt, synthetic construct
  source 1..20: mol_type = other RNA
cctgtcaaatgaggtgtggg

SEQ ID NO: 9517 - RNA, 20 nt, synthetic construct
  source 1..20: mol_type = other RNA
ggccctgatgtgcaagggga

SEQ ID NO: 9518 - RNA, 20 nt, synthetic construct
  source 1..20: mol_type = other RNA
agtctccaggccactgggcc

SEQ ID NO: 9519 - RNA, 20 nt, synthetic construct
  source 1..20: mol_type = other RNA
aggccactgggccagagctc

SEQ ID NO: 9520 - RNA, 20 nt, synthetic construct
  source 1..20: mol_type = other RNA
ggcccagtggcctggagact

SEQ ID NO: 9521 - RNA, 20 nt, synthetic construct
  source 1..20: mol_type = other RNA
caggctggcagagggttaga

SEQ ID NO: 9522 - RNA, 20 nt, synthetic construct
  source 1..20: mol_type = other RNA
gccagcctgtgagctctggc

SEQ ID NO: 9523 - RNA, 20 nt, synthetic construct
  source 1..20: mol_type = other RNA
cgcctgtaatcttagcactt

SEQ ID NO: 9524 - RNA, 20 nt, synthetic construct
  source 1..20: mol_type = other RNA
caaagtgctaagattacagg

SEQ ID NO: 9525 - RNA, 20 nt, synthetic construct
  source 1..20: mol_type = other RNA
cgccttgccctcccaaagtg

SEQ ID NO: 9526 - RNA, 20 nt, synthetic construct
  source 1..20: mol_type = other RNA
tgatcctcccgccttgccct

SEQ ID NO: 9527 - RNA, 20 nt, synthetic construct
  source 1..20: mol_type = other RNA
atgtcctgacctcatgatcc

SEQ ID NO: 9528 - RNA, 20 nt, synthetic construct
  source 1..20: mol_type = other RNA
actaaaactacaaaaaatta

SEQ ID NO: 9529 - RNA, 20 nt, synthetic construct
  source 1..20: mol_type = other RNA
ggaggctgaggcaggagaat

SEQ ID NO: 9530 - RNA, 20 nt, synthetic construct
  source 1..20: mol_type = other RNA
tgagtagctgggactacagg

SEQ ID NO: 9531 - RNA, 20 nt, synthetic construct
  source 1..20: mol_type = other RNA
gcctcctgagtagctgggac

SEQ ID NO: 9532 - RNA, 20 nt, synthetic construct
  source 1..20: mol_type = other RNA
tgcctcagcctcctgagtag

SEQ ID NO: 9533 - RNA, 20 nt, synthetic construct
  source 1..20: mol_type = other RNA
cgggttcacgccattctcct

SEQ ID NO: 9534 - RNA, 20 nt, synthetic construct
  source 1..20: mol_type = other RNA
gcctcccgggttcacgccat

SEQ ID NO: 9535 - RNA, 20 nt, synthetic construct
  source 1..20: mol_type = other RNA
ctgcaagctccgcctcccgg

SEQ ID NO: 9536 - RNA, 20 nt, synthetic construct
  source 1..20: mol_type = other RNA
gctcactgcaagctccgcct

SEQ ID NO: 9537 - RNA, 20 nt, synthetic construct
  source 1..20: mol_type = other RNA
agcctgggcaatagagcgag

SEQ ID NO: 9538 - RNA, 20 nt, synthetic construct
  source 1..20: mol_type = other RNA
attgcccaggctggagtgca

SEQ ID NO: 9539 - RNA, 20 nt, synthetic construct
  source 1..20: mol_type = other RNA
ctctattgcccaggctggag

SEQ ID NO: 9540 - RNA, 20 nt, synthetic construct
  source 1..20: mol_type = other RNA
gtctggaaagaaaaaaaaaa

SEQ ID NO: 9541 - RNA, 20 nt, synthetic construct
  source 1..20: mol_type = other RNA
tttttttttttttctttcca

SEQ ID NO: 9542 - RNA, 20 nt, synthetic construct
  source 1..20: mol_type = other RNA
tgctactgtcaacagtaaca

SEQ ID NO: 9543 - RNA, 20 nt, synthetic construct
  source 1..20: mol_type = other RNA
cccattttggtgcaggccat

SEQ ID NO: 9544 - RNA, 20 nt, synthetic construct
  source 1..20: mol_type = other RNA
actcccccattttggtgcag

SEQ ID NO: 9545 - RNA, 20 nt, synthetic construct
  source 1..20: mol_type = other RNA
gtggcactccactcccccat

SEQ ID NO: 9546 - RNA, 20 nt, synthetic construct
  source 1..20: mol_type = other RNA
agggtggggagttatggtat

SEQ ID NO: 9547 - RNA, 20 nt, synthetic construct
  source 1..20: mol_type = other RNA
ccacccttgagggtgtggtt

SEQ ID NO: 9548 - RNA, 20 nt, synthetic construct
  source 1..20: mol_type = other RNA
atgcctaggaccccccatac

SEQ ID NO: 9549 - RNA, 20 nt, synthetic construct
  source 1..20: mol_type = other RNA
caggattgtctaaagaatta

SEQ ID NO: 9550 - RNA, 20 nt, synthetic construct
  source 1..20: mol_type = other RNA
gtgaaacagggacagttgct

SEQ ID NO: 9551 - RNA, 20 nt, synthetic construct
  source 1..20: mol_type = other RNA
ccagctgtgtggccccgccc

SEQ ID NO: 9552 - RNA, 20 nt, synthetic construct
  source 1..20: mol_type = other RNA
gttcaagtttgtgtgggtcc

SEQ ID NO: 9553 - RNA, 20 nt, synthetic construct
  source 1..20: mol_type = other RNA
accgtggccgcaagtgttgg

SEQ ID NO: 9554 - RNA, 20 nt, synthetic construct
  source 1..20: mol_type = other RNA
gatgcccctccaccgtggcc

SEQ ID NO: 9555 - RNA, 20 nt, synthetic construct
  source 1..20: mol_type = other RNA
gagagtggcgggggaagttg

SEQ ID NO: 9556 - RNA, 20 nt, synthetic construct
  source 1..20: mol_type = other RNA
gaggcctggctcagatgccc

SEQ ID NO: 9557 - RNA, 20 nt, synthetic construct
  source 1..20: mol_type = other RNA
ctgaggcctggctcagatgc

SEQ ID NO: 9558 - RNA, 20 nt, synthetic construct
  source 1..20: mol_type = other RNA
ttcctctgaggctcatcctc

SEQ ID NO: 9559 - RNA, 20 nt, synthetic construct
  source 1..20: mol_type = other RNA
gaggctcatcctcttggtgc

SEQ ID NO: 9560 - RNA, 20 nt, synthetic construct
  source 1..20: mol_type = other RNA
gaggaatgagaagggcacac

SEQ ID NO: 9561 - RNA, 20 nt, synthetic construct
  source 1..20: mol_type = other RNA
tcctcttggtgcctctcttt

SEQ ID NO: 9562 - RNA, 20 nt, synthetic construct
  source 1..20: mol_type = other RNA
tggtgcctctctttcatgga

SEQ ID NO: 9563 - RNA, 20 nt, synthetic construct
  source 1..20: mol_type = other RNA
ctttcatggaaagggataat

SEQ ID NO: 9564 - RNA, 20 nt, synthetic construct
  source 1..20: mol_type = other RNA
ttcatggaaagggataataa

SEQ ID NO: 9565 - RNA, 20 nt, synthetic construct
  source 1..20: mol_type = other RNA
caataaccttattatccctt

SEQ ID NO: 9566 - RNA, 20 nt, synthetic construct
  source 1..20: mol_type = other RNA
ggggatcctcacaataacct

SEQ ID NO: 9567 - RNA, 20 nt, synthetic construct
  source 1..20: mol_type = other RNA
gtctaagcgtctgaatatac

SEQ ID NO: 9568 - RNA, 20 nt, synthetic construct
  source 1..20: mol_type = other RNA
gtgcctggctctgtctaagc

SEQ ID NO: 9569 - RNA, 20 nt, synthetic construct
  source 1..20: mol_type = other RNA
gcagaaccttgaccaataca

SEQ ID NO: 9570 - RNA, 20 nt, synthetic construct
  source 1..20: mol_type = other RNA
taatatatacatcctactgg

SEQ ID NO: 9571 - RNA, 20 nt, synthetic construct
  source 1..20: mol_type = other RNA
tgtgaccgtgcgggctggca

SEQ ID NO: 9572 - RNA, 20 nt, synthetic construct
  source 1..20: mol_type = other RNA
gtattgcaacatcaaattct

SEQ ID NO: 9573 - RNA, 20 nt, synthetic construct
  source 1..20: mol_type = other RNA
cagggaagaaggaattctgc

SEQ ID NO: 9574 - RNA, 20 nt, synthetic construct
  source 1..20: mol_type = other RNA
gtctgttctcttaaggcctt

SEQ ID NO: 9575 - RNA, 20 nt, synthetic construct
  source 1..20: mol_type = other RNA
taaggccttcaactgattaa

SEQ ID NO: 9576 - RNA, 20 nt, synthetic construct
  source 1..20: mol_type = other RNA
tttaatcagttgaaggcctt

SEQ ID NO: 9577 - RNA, 20 nt, synthetic construct
  source 1..20: mol_type = other RNA
ataacttgggcaggcctcat

SEQ ID NO: 9578 - RNA, 20 nt, synthetic construct
  source 1..20: mol_type = other RNA
ctataacttgggcaggcctc

SEQ ID NO: 9579 - RNA, 20 nt, synthetic construct
  source 1..20: mol_type = other RNA
gtcttctgatttaaatgtta

SEQ ID NO: 9580 - RNA, 20 nt, synthetic construct
  source 1..20: mol_type = other RNA
gtgcctgtaagggaggggct

SEQ ID NO: 9581 - RNA, 20 nt, synthetic construct
  source 1..20: mol_type = other RNA
cttacaggcacagagtgatg

SEQ ID NO: 9582 - RNA, 20 nt, synthetic construct
  source 1..20: mol_type = other RNA
cctttcccagcccctccctt

SEQ ID NO: 9583 - RNA, 20 nt, synthetic construct
  source 1..20: mol_type = other RNA
ccaaggggtgaccttggctt

SEQ ID NO: 9584 - RNA, 20 nt, synthetic construct
  source 1..20: mol_type = other RNA
caggcctggagtttattcgg

SEQ ID NO: 9585 - RNA, 20 nt, synthetic construct
  source 1..20: mol_type = other RNA
aggcctgggaggaacaaagc

SEQ ID NO: 9586 - RNA, 20 nt, synthetic construct
  source 1..20: mol_type = other RNA
acgccgcctgccagcgcctg

SEQ ID NO: 9587 - RNA, 20 nt, synthetic construct
  source 1..20: mol_type = other RNA
ccaggcgctggcaggcggcg

SEQ ID NO: 9588 - RNA, 20 nt, synthetic construct
  source 1..20: mol_type = other RNA
actccccagcctcagctccc

SEQ ID NO: 9589 - RNA, 20 nt, synthetic construct
  source 1..20: mol_type = other RNA
ccagcctcagctcccgaggt

SEQ ID NO: 9590 - RNA, 20 nt, synthetic construct
  source 1..20: mol_type = other RNA
gctcccgaggtaggtgctgg

SEQ ID NO: 9591 - RNA, 20 nt, synthetic construct
  source 1..20: mol_type = other RNA
cgaggtaggtgctggggctg

SEQ ID NO: 9592 - RNA, 20 nt, synthetic construct
  source 1..20: mol_type = other RNA
ggagctgaggctggggagta

SEQ ID NO: 9593 - RNA, 20 nt, synthetic construct
  source 1..20: mol_type = other RNA
gccccctacccgcgccttgg

SEQ ID NO: 9594 - RNA, 20 nt, synthetic construct
  source 1..20: mol_type = other RNA
gccctccgccccctacccgc

SEQ ID NO: 9595 - RNA, 20 nt, synthetic construct
  source 1..20: mol_type = other RNA
gccctccgccctccgccccc

SEQ ID NO: 9596 - RNA, 20 nt, synthetic construct
  source 1..20: mol_type = other RNA
ctccgccctccgccctccgc

SEQ ID NO: 9597 - RNA, 20 nt, synthetic construct
  source 1..20: mol_type = other RNA
aggaacgtgccacaagaagc

SEQ ID NO: 9598 - RNA, 20 nt, synthetic construct
  source 1..20: mol_type = other RNA
ttccaaagccagaagggttc

SEQ ID NO: 9599 - RNA, 20 nt, synthetic construct
  source 1..20: mol_type = other RNA
gacgactccttccaaagcca

SEQ ID NO: 9600 - RNA, 20 nt, synthetic construct
  source 1..20: mol_type = other RNA
cgcatggcgggggtctctga

SEQ ID NO: 9601 - RNA, 20 nt, synthetic construct
  source 1..20: mol_type = other RNA
ccagcctcccgcatggcggg

SEQ ID NO: 9602 - RNA, 20 nt, synthetic construct
  source 1..20: mol_type = other RNA
aaacctccatcatcgcagag

SEQ ID NO: 9603 - RNA, 20 nt, synthetic construct
  source 1..20: mol_type = other RNA
atcatcgcagagtctgaata

SEQ ID NO: 9604 - RNA, 20 nt, synthetic construct
  source 1..20: mol_type = other RNA
gcgatgatggaggtttcgag

SEQ ID NO: 9605 - RNA, 20 nt, synthetic construct
  source 1..20: mol_type = other RNA
ccctcctgaaggtcttctgg

SEQ ID NO: 9606 - RNA, 20 nt, synthetic construct
  source 1..20: mol_type = other RNA
ctcctgaaggtcttctggta

SEQ ID NO: 9607 - RNA, 20 nt, synthetic construct
  source 1..20: mol_type = other RNA
tgaaggtcttctggtacccg

SEQ ID NO: 9608 - RNA, 20 nt, synthetic construct
  source 1..20: mol_type = other RNA
ccatctccatccccaggccc

SEQ ID NO: 9609 - RNA, 20 nt, synthetic construct
  source 1..20: mol_type = other RNA
atccccaggccctgcgtcct

SEQ ID NO: 9610 - RNA, 20 nt, synthetic construct
  source 1..20: mol_type = other RNA
gcccaatactctttgggcct

SEQ ID NO: 9611 - RNA, 20 nt, synthetic construct
  source 1..20: mol_type = other RNA
ttgggcctccctgttgtcca

SEQ ID NO: 9612 - RNA, 20 nt, synthetic construct
  source 1..20: mol_type = other RNA
ctgttgtccagctctctccg

SEQ ID NO: 9613 - RNA, 20 nt, synthetic construct
  source 1..20: mol_type = other RNA
ctccgcggctccatgactga

SEQ ID NO: 9614 - RNA, 20 nt, synthetic construct
  source 1..20: mol_type = other RNA
ccgcggctccatgactgaca

SEQ ID NO: 9615 - RNA, 20 nt, synthetic construct
  source 1..20: mol_type = other RNA
gcggctccatgactgacaac

SEQ ID NO: 9616 - RNA, 20 nt, synthetic construct
  source 1..20: mol_type = other RNA
atgactgacaacttgagcaa

SEQ ID NO: 9617 - RNA, 20 nt, synthetic construct
  source 1..20: mol_type = other RNA
agttgtcagtcatggagccg

SEQ ID NO: 9618 - RNA, 20 nt, synthetic construct
  source 1..20: mol_type = other RNA
cattcacattagccttgctc

SEQ ID NO: 9619 - RNA, 20 nt, synthetic construct
  source 1..20: mol_type = other RNA
accgctcccattcacattag

SEQ ID NO: 9620 - RNA, 20 nt, synthetic construct
  source 1..20: mol_type = other RNA
gacctctcacccgaggaaca

SEQ ID NO: 9621 - RNA, 20 nt, synthetic construct
  source 1..20: mol_type = other RNA
cacccgaggaacatccacag

SEQ ID NO: 9622 - RNA, 20 nt, synthetic construct
  source 1..20: mol_type = other RNA
cccgaggaacatccacagag

SEQ ID NO: 9623 - RNA, 20 nt, synthetic construct
  source 1..20: mol_type = other RNA
ggtgagaggtctgagccctc

SEQ ID NO: 9624 - RNA, 20 nt, synthetic construct
  source 1..20: mol_type = other RNA
gtggatgttcctcgggtgag

SEQ ID NO: 9625 - RNA, 20 nt, synthetic construct
  source 1..20: mol_type = other RNA
gtgtctgtgtccccgcagcc

SEQ ID NO: 9626 - RNA, 20 nt, synthetic construct
  source 1..20: mol_type = other RNA
gccctgaggagctggggggc

SEQ ID NO: 9627 - RNA, 20 nt, synthetic construct
  source 1..20: mol_type = other RNA
gggccgaggctccgtgtctg

SEQ ID NO: 9628 - RNA, 20 nt, synthetic construct
  source 1..20: mol_type = other RNA
tcagggccgaggctccgtgt

SEQ ID NO: 9629 - RNA, 20 nt, synthetic construct
  source 1..20: mol_type = other RNA
tctgacccaccactcctcca

SEQ ID NO: 9630 - RNA, 20 nt, synthetic construct
  source 1..20: mol_type = other RNA
gacccaccactcctccagtg

SEQ ID NO: 9631 - RNA, 20 nt, synthetic construct
  source 1..20: mol_type = other RNA
tccagtgtcaggacactgcg

SEQ ID NO: 9632 - RNA, 20 nt, synthetic construct
  source 1..20: mol_type = other RNA
agtgtcaggacactgcgggt

SEQ ID NO: 9633 - RNA, 20 nt, synthetic construct
  source 1..20: mol_type = other RNA
gcaacccccacccccaacgc

SEQ ID NO: 9634 - RNA, 20 nt, synthetic construct
  source 1..20: mol_type = other RNA
gccttgtcctctcagtttcc

SEQ ID NO: 9635 - RNA, 20 nt, synthetic construct
  source 1..20: mol_type = other RNA
cagtttccccccgtggcact

SEQ ID NO: 9636 - RNA, 20 nt, synthetic construct
  source 1..20: mol_type = other RNA
gtttccccccgtggcactta

SEQ ID NO: 9637 - RNA, 20 nt, synthetic construct
  source 1..20: mol_type = other RNA
cccactaggatgtaaactcc

SEQ ID NO: 9638 - RNA, 20 nt, synthetic construct
  source 1..20: mol_type = other RNA
acaggggcattgggaatgct

SEQ ID NO: 9639 - RNA, 20 nt, synthetic construct
  source 1..20: mol_type = other RNA
gtccctaccatagccaggca

SEQ ID NO: 9640 - RNA, 20 nt, synthetic construct
  source 1..20: mol_type = other RNA
cctctgtccctaccatagcc

SEQ ID NO: 9641 - RNA, 20 nt, synthetic construct
  source 1..20: mol_type = other RNA
ggcacccctgccccgccctg

SEQ ID NO: 9642 - RNA, 20 nt, synthetic construct
  source 1..20: mol_type = other RNA
taaggaaaatctgactgccc

SEQ ID NO: 9643 - RNA, 20 nt, synthetic construct
  source 1..20: mol_type = other RNA
aatgtcccctcctaaggaaa

SEQ ID NO: 9644 - RNA, 20 nt, synthetic construct
  source 1..20: mol_type = other RNA
ggccttgccagctgggctgg

SEQ ID NO: 9645 - RNA, 20 nt, synthetic construct
  source 1..20: mol_type = other RNA
gcaacccctctcttgggctc

SEQ ID NO: 9646 - RNA, 20 nt, synthetic construct
  source 1..20: mol_type = other RNA
cttgggctcctttctctgcc

SEQ ID NO: 9647 - RNA, 20 nt, synthetic construct
  source 1..20: mol_type = other RNA
tgggctcctttctctgccac

SEQ ID NO: 9648 - RNA, 20 nt, synthetic construct
  source 1..20: mol_type = other RNA
tttctctgccacccacctcc

SEQ ID NO: 9649 - RNA, 20 nt, synthetic construct
  source 1..20: mol_type = other RNA
gccacccacctcctcacctt

SEQ ID NO: 9650 - RNA, 20 nt, synthetic construct
  source 1..20: mol_type = other RNA
tcacctttccaggtcatcac

SEQ ID NO: 9651 - RNA, 20 nt, synthetic construct
  source 1..20: mol_type = other RNA
cctttccaggtcatcacagt

SEQ ID NO: 9652 - RNA, 20 nt, synthetic construct
  source 1..20: mol_type = other RNA
ttgccccaggggaggacatc

SEQ ID NO: 9653 - RNA, 20 nt, synthetic construct
  source 1..20: mol_type = other RNA
cctggggcaaagaggtccac

SEQ ID NO: 9654 - RNA, 20 nt, synthetic construct
  source 1..20: mol_type = other RNA
agcgactgcagcacctgctt

SEQ ID NO: 9655 - RNA, 20 nt, synthetic construct
  source 1..20: mol_type = other RNA
gtgacacaaagcaggtgctg

SEQ ID NO: 9656 - RNA, 20 nt, synthetic construct
  source 1..20: mol_type = other RNA
gccaccgtgatgctaacagc

SEQ ID NO: 9657 - RNA, 20 nt, synthetic construct
  source 1..20: mol_type = other RNA
agtgccaggctctgtgcagg

SEQ ID NO: 9658 - RNA, 20 nt, synthetic construct
  source 1..20: mol_type = other RNA
gtgcagggggaccagagatg

SEQ ID NO: 9659 - RNA, 20 nt, synthetic construct
  source 1..20: mol_type = other RNA
ggtccccctgcacagagcct

SEQ ID NO: 9660 - RNA, 20 nt, synthetic construct
  source 1..20: mol_type = other RNA
gtctgatgagggaggcgagt

SEQ ID NO: 9661 - RNA, 20 nt, synthetic construct
  source 1..20: mol_type = other RNA
tcagactgagtgtccttgaa

SEQ ID NO: 9662 - RNA, 20 nt, synthetic construct
  source 1..20: mol_type = other RNA
ctcatcagactgagtgtcct

SEQ ID NO: 9663 - RNA, 20 nt, synthetic construct
  source 1..20: mol_type = other RNA
cctccctcatcagactgagt

SEQ ID NO: 9664 - RNA, 20 nt, synthetic construct
  source 1..20: mol_type = other RNA
gtgcactcgcctccctcatc

SEQ ID NO: 9665 - RNA, 20 nt, synthetic construct
  source 1..20: mol_type = other RNA
tgtttcctctgtgcactcgc

SEQ ID NO: 9666 - RNA, 20 nt, synthetic construct
  source 1..20: mol_type = other RNA
aatacagccctgacctcgtg

SEQ ID NO: 9667 - RNA, 20 nt, synthetic construct
  source 1..20: mol_type = other RNA
ctctaatacagccctgacct

SEQ ID NO: 9668 - RNA, 20 nt, synthetic construct
  source 1..20: mol_type = other RNA
gggctccctctaatacagcc

SEQ ID NO: 9669 - RNA, 20 nt, synthetic construct
  source 1..20: mol_type = other RNA
tctgggctccctctaataca

SEQ ID NO: 9670 - RNA, 20 nt, synthetic construct
  source 1..20: mol_type = other RNA
ggctgggcaggtgcctcctc

SEQ ID NO: 9671 - RNA, 20 nt, synthetic construct
  source 1..20: mol_type = other RNA
gaccctcgggctgggcaggt

SEQ ID NO: 9672 - RNA, 20 nt, synthetic construct
  source 1..20: mol_type = other RNA
aagatgccttctctgaccct

SEQ ID NO: 9673 - RNA, 20 nt, synthetic construct
  source 1..20: mol_type = other RNA
tccaagatgccttctctgac

SEQ ID NO: 9674 - RNA, 20 nt, synthetic construct
  source 1..20: mol_type = other RNA
cgatcaaatgtccctcctcc

SEQ ID NO: 9675 - RNA, 20 nt, synthetic construct
  source 1..20: mol_type = other RNA
tattcatccatcaagctccc

SEQ ID NO: 9676 - RNA, 20 nt, synthetic construct
  source 1..20: mol_type = other RNA
aagccttggtagttgctgtc

SEQ ID NO: 9677 - RNA, 20 nt, synthetic construct
  source 1..20: mol_type = other RNA
cacctctaagccttggtagt

SEQ ID NO: 9678 - RNA, 20 nt, synthetic construct
  source 1..20: mol_type = other RNA
cacacctctaagccttggta

SEQ ID NO: 9679 - RNA, 20 nt, synthetic construct
  source 1..20: mol_type = other RNA
tctcacacctctaagccttg

SEQ ID NO: 9680 - RNA, 20 nt, synthetic construct
  source 1..20: mol_type = other RNA
ctgagtaaggactgcaggcg

SEQ ID NO: 9681 - RNA, 20 nt, synthetic construct
  source 1..20: mol_type = other RNA
gtgaggtaagacagcctcct

SEQ ID NO: 9682 - RNA, 20 nt, synthetic construct
  source 1..20: mol_type = other RNA
aaggtaagccgcctgcagtc

SEQ ID NO: 9683 - RNA, 20 nt, synthetic construct
  source 1..20: mol_type = other RNA
tctcgaaggtaagccgcctg

SEQ ID NO: 9684 - RNA, 20 nt, synthetic construct
  source 1..20: mol_type = other RNA
cttctcgaaggtaagccgcc

SEQ ID NO: 9685 - RNA, 20 nt, synthetic construct
  source 1..20: mol_type = other RNA
tgccagtgcacacacgcaca

SEQ ID NO: 9686 - RNA, 20 nt, synthetic construct
  source 1..20: mol_type = other RNA
tgccccagcaggggactcct

SEQ ID NO: 9687 - RNA, 20 nt, synthetic construct
  source 1..20: mol_type = other RNA
gcagacagcatcatggctgc

SEQ ID NO: 9688 - RNA, 20 nt, synthetic construct
  source 1..20: mol_type = other RNA
ggctcggcagacagcatcat

SEQ ID NO: 9689 - RNA, 20 nt, synthetic construct
  source 1..20: mol_type = other RNA
ccctggccgagttgaggcag

SEQ ID NO: 9690 - RNA, 20 nt, synthetic construct
  source 1..20: mol_type = other RNA
gccagggtgagctccggctc

SEQ ID NO: 9691 - RNA, 20 nt, synthetic construct
  source 1..20: mol_type = other RNA
actcggccagggtgagctcc

SEQ ID NO: 9692 - RNA, 20 nt, synthetic construct
  source 1..20: mol_type = other RNA
gcctcaactcggccagggtg

SEQ ID NO: 9693 - RNA, 20 nt, synthetic construct
  source 1..20: mol_type = other RNA
gccaaagatgtcatcaatga

SEQ ID NO: 9694 - RNA, 20 nt, synthetic construct
  source 1..20: mol_type = other RNA
ttgatgacatctttggcaga

SEQ ID NO: 9695 - RNA, 20 nt, synthetic construct
  source 1..20: mol_type = other RNA
gggaaccaggcctcattgat

SEQ ID NO: 9696 - RNA, 20 nt, synthetic construct
  source 1..20: mol_type = other RNA
caagccccagcctggacttg

SEQ ID NO: 9697 - RNA, 20 nt, synthetic construct
  source 1..20: mol_type = other RNA
cccttctcccttgtctgtgt

SEQ ID NO: 9698 - RNA, 20 nt, synthetic construct
  source 1..20: mol_type = other RNA
cttctcccttgtctgtgtaa

SEQ ID NO: 9699 - RNA, 20 nt, synthetic construct
  source 1..20: mol_type = other RNA
cttgtctgtgtaaggaggat

SEQ ID NO: 9700 - RNA, 20 nt, synthetic construct
  source 1..20: mol_type = other RNA
ttacacagacaagggagaag

SEQ ID NO: 9701 - RNA, 20 nt, synthetic construct
  source 1..20: mol_type = other RNA
tttaatcctatttaaggtgg

SEQ ID NO: 9702 - RNA, 20 nt, synthetic construct
  source 1..20: mol_type = other RNA
gaaagggctgtgcaatattt

SEQ ID NO: 9703 - RNA, 20 nt, synthetic construct
  source 1..20: mol_type = other RNA
ataaaaacacgttatgaaaa

SEQ ID NO: 9704 - RNA, 20 nt, synthetic construct
  source 1..20: mol_type = other RNA
actgtctctataaaaacacg

SEQ ID NO: 9705 - RNA, 20 nt, synthetic construct
  source 1..20: mol_type = other RNA
tctctcctaccatgaactaa

SEQ ID NO: 9706 - RNA, 20 nt, synthetic construct
  source 1..20: mol_type = other RNA
ctcctaccatgaactaaaga

SEQ ID NO: 9707 - RNA, 20 nt, synthetic construct
  source 1..20: mol_type = other RNA
cctaccatgaactaaagatt

SEQ ID NO: 9708 - RNA, 20 nt, synthetic construct
  source 1..20: mol_type = other RNA
taccatgaactaaagatttc

SEQ ID NO: 9709 - RNA, 20 nt, synthetic construct
  source 1..20: mol_type = other RNA
acagaaatctttagttcatg

SEQ ID NO: 9710 - RNA, 20 nt, synthetic construct
  source 1..20: mol_type = other RNA
ctcccagcaccccctcctca

SEQ ID NO: 9711 - RNA, 20 nt, synthetic construct
  source 1..20: mol_type = other RNA
cagcaccccctcctcatccc

SEQ ID NO: 9712 - RNA, 20 nt, synthetic construct
  source 1..20: mol_type = other RNA
tcatcccaggccctttttgc

SEQ ID NO: 9713 - RNA, 20 nt, synthetic construct
  source 1..20: mol_type = other RNA
tcccaggccctttttgcagg

SEQ ID NO: 9714 - RNA, 20 nt, synthetic construct
  source 1..20: mol_type = other RNA
gggcctacacggatggccac

SEQ ID NO: 9715 - RNA, 20 nt, synthetic construct
  source 1..20: mol_type = other RNA
tctggggcgcagcgggcgac

SEQ ID NO: 9716 - RNA, 20 nt, synthetic construct
  source 1..20: mol_type = other RNA
tcatctggggcgcagcgggc

SEQ ID NO: 9717 - RNA, 20 nt, synthetic construct
  source 1..20: mol_type = other RNA
gcagctcctcatctggggcg

SEQ ID NO: 9718 - RNA, 20 nt, synthetic construct
  source 1..20: mol_type = other RNA
agtttctccaggagtgggaa

SEQ ID NO: 9719 - RNA, 20 nt, synthetic construct
  source 1..20: mol_type = other RNA
aggagtgggaagcggcgggg

SEQ ID NO: 9720 - RNA, 20 nt, synthetic construct
  source 1..20: mol_type = other RNA
tggagaaactggagcagctc

SEQ ID NO: 9721 - RNA, 20 nt, synthetic construct
  source 1..20: mol_type = other RNA
ccccgccgcttcccactcct

SEQ ID NO: 9722 - RNA, 20 nt, synthetic construct
  source 1..20: mol_type = other RNA
atgcgctcgccccgccgctt

SEQ ID NO: 9723 - RNA, 20 nt, synthetic construct
  source 1..20: mol_type = other RNA
ttcgtgtgtgtgtgtgtgtg

SEQ ID NO: 9724 - RNA, 20 nt, synthetic construct
  source 1..20: mol_type = other RNA
gggacccccagcaagcccct

SEQ ID NO: 9725 - RNA, 20 nt, synthetic construct
  source 1..20: mol_type = other RNA
atcctccagactccagctct

SEQ ID NO: 9726 - RNA, 20 nt, synthetic construct
  source 1..20: mol_type = other RNA
agactccagctcttctgtaa

SEQ ID NO: 9727 - RNA, 20 nt, synthetic construct
  source 1..20: mol_type = other RNA
agctcttctgtaagcttaca

SEQ ID NO: 9728 - RNA, 20 nt, synthetic construct
  source 1..20: mol_type = other RNA
tctgtaagcttacagggctg

SEQ ID NO: 9729 - RNA, 20 nt, synthetic construct
  source 1..20: mol_type = other RNA
tggtctggccagccctgtaa

SEQ ID NO: 9730 - RNA, 20 nt, synthetic construct
  source 1..20: mol_type = other RNA
tcacttcacgcggctggggg

SEQ ID NO: 9731 - RNA, 20 nt, synthetic construct
  source 1..20: mol_type = other RNA
cttcacgcggctgggggctg

SEQ ID NO: 9732 - RNA, 20 nt, synthetic construct
  source 1..20: mol_type = other RNA
agcagcccccagccgcgtga

SEQ ID NO: 9733 - RNA, 20 nt, synthetic construct
  source 1..20: mol_type = other RNA
ccagcagcccccagccgcgt

SEQ ID NO: 9734 - RNA, 20 nt, synthetic construct
  source 1..20: mol_type = other RNA
ctccagcagcccccagccgc

SEQ ID NO: 9735 - RNA, 20 nt, synthetic construct
  source 1..20: mol_type = other RNA
aggaaacccttcccgctgtg

SEQ ID NO: 9736 - RNA, 20 nt, synthetic construct
  source 1..20: mol_type = other RNA
cctgggtgtgagcgtgcggc

SEQ ID NO: 9737 - RNA, 20 nt, synthetic construct
  source 1..20: mol_type = other RNA
cacccaggtgagcattgaaa

SEQ ID NO: 9738 - RNA, 20 nt, synthetic construct
  source 1..20: mol_type = other RNA
cgcggccctgccgcacgctc

SEQ ID NO: 9739 - RNA, 20 nt, synthetic construct
  source 1..20: mol_type = other RNA
ggactcagccatctctaggc

SEQ ID NO: 9740 - RNA, 20 nt, synthetic construct
  source 1..20: mol_type = other RNA
gccatctctaggcccctctc

SEQ ID NO: 9741 - RNA, 20 nt, synthetic construct
  source 1..20: mol_type = other RNA
aggcccctctcactcaggtg

SEQ ID NO: 9742 - RNA, 20 nt, synthetic construct
  source 1..20: mol_type = other RNA
cactcaggtgctccatggtt

SEQ ID NO: 9743 - RNA, 20 nt, synthetic construct
  source 1..20: mol_type = other RNA
ctcaggtgctccatggttct

SEQ ID NO: 9744 - RNA, 20 nt, synthetic construct
  source 1..20: mol_type = other RNA
ggtgctccatggttctggga

SEQ ID NO: 9745 - RNA, 20 nt, synthetic construct
  source 1..20: mol_type = other RNA
atggttctgggagctgagaa

SEQ ID NO: 9746 - RNA, 20 nt, synthetic construct
  source 1..20: mol_type = other RNA
cagaaccatggagcacctga

SEQ ID NO: 9747 - RNA, 20 nt, synthetic construct
  source 1..20: mol_type = other RNA
gctcccagaaccatggagca

SEQ ID NO: 9748 - RNA, 20 nt, synthetic construct
  source 1..20: mol_type = other RNA
aaccagcaaaaaagtggaat

SEQ ID NO: 9749 - RNA, 20 nt, synthetic construct
  source 1..20: mol_type = other RNA
tagctgggcactgcccttcc

SEQ ID NO: 9750 - RNA, 20 nt, synthetic construct
  source 1..20: mol_type = other RNA
cctagctgggcactgccctt

SEQ ID NO: 9751 - RNA, 20 nt, synthetic construct
  source 1..20: mol_type = other RNA
ctctcctagctgggcactgc

SEQ ID NO: 9752 - RNA, 20 nt, synthetic construct
  source 1..20: mol_type = other RNA
tcactctcctagctgggcac

SEQ ID NO: 9753 - RNA, 20 nt, synthetic construct
  source 1..20: mol_type = other RNA
agccagaaatgcctgcccct

SEQ ID NO: 9754 - RNA, 20 nt, synthetic construct
  source 1..20: mol_type = other RNA
tcaagccagaaatgcctgcc

SEQ ID NO: 9755 - RNA, 20 nt, synthetic construct
  source 1..20: mol_type = other RNA
tgtgagaggcagagtgggtg

SEQ ID NO: 9756 - RNA, 20 nt, synthetic construct
  source 1..20: mol_type = other RNA
cacgagcattaagaccccat

SEQ ID NO: 9757 - RNA, 20 nt, synthetic construct
  source 1..20: mol_type = other RNA
cacacgagcattaagacccc

SEQ ID NO: 9758 - RNA, 20 nt, synthetic construct
  source 1..20: mol_type = other RNA
gcctctcacacgagcattaa

SEQ ID NO: 9759 - RNA, 20 nt, synthetic construct
  source 1..20: mol_type = other RNA
acccactctgcctctcacac

SEQ ID NO: 9760 - RNA, 20 nt, synthetic construct
  source 1..20: mol_type = other RNA
actccacccactctgcctct

SEQ ID NO: 9761 - RNA, 20 nt, synthetic construct
  source 1..20: mol_type = other RNA
tggatttctctctatctcca

SEQ ID NO: 9762 - RNA, 20 nt, synthetic construct
  source 1..20: mol_type = other RNA
ctatctccattttgaaacca

SEQ ID NO: 9763 - RNA, 20 nt, synthetic construct
  source 1..20: mol_type = other RNA
atctccattttgaaaccact

SEQ ID NO: 9764 - RNA, 20 nt, synthetic construct
  source 1..20: mol_type = other RNA
attttgaaaccactctgtgt

SEQ ID NO: 9765 - RNA, 20 nt, synthetic construct
  source 1..20: mol_type = other RNA
gtgtttggaagaacttttga

SEQ ID NO: 9766 - RNA, 20 nt, synthetic construct
  source 1..20: mol_type = other RNA
aaagttcttccaaacacaga

SEQ ID NO: 9767 - RNA, 20 nt, synthetic construct
  source 1..20: mol_type = other RNA
gaatactcaaaagttcttcc

SEQ ID NO: 9768 - RNA, 20 nt, synthetic construct
  source 1..20: mol_type = other RNA
tgcccaaggaagactgttct

SEQ ID NO: 9769 - RNA, 20 nt, synthetic construct
  source 1..20: mol_type = other RNA
ctcctgcccaaggaagactg

SEQ ID NO: 9770 - RNA, 20 nt, synthetic construct
  source 1..20: mol_type = other RNA
ttgtccccagaaggctgggt

SEQ ID NO: 9771 - RNA, 20 nt, synthetic construct
  source 1..20: mol_type = other RNA
tcagtgtccctgccaggggc

SEQ ID NO: 9772 - RNA, 20 nt, synthetic construct
  source 1..20: mol_type = other RNA
agcaccctcatcagtgtccc

SEQ ID NO: 9773 - RNA, 20 nt, synthetic construct
  source 1..20: mol_type = other RNA
aaggcccaagggggcaagct

SEQ ID NO: 9774 - RNA, 20 nt, synthetic construct
  source 1..20: mol_type = other RNA
cccccaaaagcgttgtgggc

SEQ ID NO: 9775 - RNA, 20 nt, synthetic construct
  source 1..20: mol_type = other RNA
accagctgaggccagcatgg

SEQ ID NO: 9776 - RNA, 20 nt, synthetic construct
  source 1..20: mol_type = other RNA
gctggtggagctgtgtggac

SEQ ID NO: 9777 - RNA, 20 nt, synthetic construct
  source 1..20: mol_type = other RNA
caggtaggaggctgggcttg

SEQ ID NO: 9778 - RNA, 20 nt, synthetic construct
  source 1..20: mol_type = other RNA
tacctgtgaggacgtggccc

SEQ ID NO: 9779 - RNA, 20 nt, synthetic construct
  source 1..20: mol_type = other RNA
ccccagggcaagcccagcct

SEQ ID NO: 9780 - RNA, 20 nt, synthetic construct
  source 1..20: mol_type = other RNA
tcaccccagggcaagcccag

SEQ ID NO: 9781 - RNA, 20 nt, synthetic construct
  source 1..20: mol_type = other RNA
ttctccttatgcacccactg

SEQ ID NO: 9782 - RNA, 20 nt, synthetic construct
  source 1..20: mol_type = other RNA
ttatgcacccactgcccgcg

SEQ ID NO: 9783 - RNA, 20 nt, synthetic construct
  source 1..20: mol_type = other RNA
cgggcagtgggtgcataagg

SEQ ID NO: 9784 - RNA, 20 nt, synthetic construct
  source 1..20: mol_type = other RNA
caagtgtgatccatgagact

SEQ ID NO: 9785 - RNA, 20 nt, synthetic construct
  source 1..20: mol_type = other RNA
tggatcacacttgtgaggac

SEQ ID NO: 9786 - RNA, 20 nt, synthetic construct
  source 1..20: mol_type = other RNA
agcctgacttgcagttccat

SEQ ID NO: 9787 - RNA, 20 nt, synthetic construct
  source 1..20: mol_type = other RNA
ggttctgccacttccatgcc

SEQ ID NO: 9788 - RNA, 20 nt, synthetic construct
  source 1..20: mol_type = other RNA
aagggcatggaagtggcaga

SEQ ID NO: 9789 - RNA, 20 nt, synthetic construct
  source 1..20: mol_type = other RNA
tcatctcagcttcctcctcc

SEQ ID NO: 9790 - RNA, 20 nt, synthetic construct
  source 1..20: mol_type = other RNA
tctcagcttcctcctccata

SEQ ID NO: 9791 - RNA, 20 nt, synthetic construct
  source 1..20: mol_type = other RNA
gcttcctcctccataagagg

SEQ ID NO: 9792 - RNA, 20 nt, synthetic construct
  source 1..20: mol_type = other RNA
tccataagagggaaaaaggt

SEQ ID NO: 9793 - RNA, 20 nt, synthetic construct
  source 1..20: mol_type = other RNA
ataagagggaaaaaggtatt

SEQ ID NO: 9794 - RNA, 20 nt, synthetic construct
  source 1..20: mol_type = other RNA
tatggaggaggaagctgaga

SEQ ID NO: 9795 - RNA, 20 nt, synthetic construct
  source 1..20: mol_type = other RNA
ttgtgttgcaaggagatggg

SEQ ID NO: 9796 - RNA, 20 nt, synthetic construct
  source 1..20: mol_type = other RNA
ttgcaacacaatgaggcagg

SEQ ID NO: 9797 - RNA, 20 nt, synthetic construct
  source 1..20: mol_type = other RNA
aggccagtgccctagatgct

SEQ ID NO: 9798 - RNA, 20 nt, synthetic construct
  source 1..20: mol_type = other RNA
tggactgcaccaccttaggc

SEQ ID NO: 9799 - RNA, 20 nt, synthetic construct
  source 1..20: mol_type = other RNA
cctggactgcaccaccttag

SEQ ID NO: 9800 - RNA, 20 nt, synthetic construct
  source 1..20: mol_type = other RNA
agagagaggcccccggctgg

SEQ ID NO: 9801 - RNA, 20 nt, synthetic construct
  source 1..20: mol_type = other RNA
ggagctgcctctcctggact

SEQ ID NO: 9802 - RNA, 20 nt, synthetic construct
  source 1..20: mol_type = other RNA
ctggagctgcctctcctgga

SEQ ID NO: 9803 - RNA, 20 nt, synthetic construct
  source 1..20: mol_type = other RNA
ctctggagctgcctctcctg

SEQ ID NO: 9804 - RNA, 20 nt, synthetic construct
  source 1..20: mol_type = other RNA
tttcagccccagccgggggc

SEQ ID NO: 9805 - RNA, 20 nt, synthetic construct
  source 1..20: mol_type = other RNA
gtttgaatttcaccctgccg

SEQ ID NO: 9806 - RNA, 20 nt, synthetic construct
  source 1..20: mol_type = other RNA
atagctgtgtgacttgggca

SEQ ID NO: 9807 - RNA, 20 nt, synthetic construct
  source 1..20: mol_type = other RNA
gtatgaggaaatgatgagtg

SEQ ID NO: 9808 - RNA, 20 nt, synthetic construct
  source 1..20: mol_type = other RNA
tacagagatgttaagtaatt

SEQ ID NO: 9809 - RNA, 20 nt, synthetic construct
  source 1..20: mol_type = other RNA
tcatttcctcatacagagat

SEQ ID NO: 9810 - RNA, 20 nt, synthetic construct
  source 1..20: mol_type = other RNA
ggtataggcaactattgacg

SEQ ID NO: 9811 - RNA, 20 nt, synthetic construct
  source 1..20: mol_type = other RNA
tggggcatcaagggatggtg

SEQ ID NO: 9812 - RNA, 20 nt, synthetic construct
  source 1..20: mol_type = other RNA
gggcaccatcccttgatgcc

SEQ ID NO: 9813 - RNA, 20 nt, synthetic construct
  source 1..20: mol_type = other RNA
gcctcagggcaccatccctt

SEQ ID NO: 9814 - RNA, 20 nt, synthetic construct
  source 1..20: mol_type = other RNA
acccaaccagaacagctcag

SEQ ID NO: 9815 - RNA, 20 nt, synthetic construct
  source 1..20: mol_type = other RNA
tgctccacccaaccagaaca

SEQ ID NO: 9816 - RNA, 20 nt, synthetic construct
  source 1..20: mol_type = other RNA
catgctccacccaaccagaa

SEQ ID NO: 9817 - RNA, 20 nt, synthetic construct
  source 1..20: mol_type = other RNA
agcctggaataagaggctca

SEQ ID NO: 9818 - RNA, 20 nt, synthetic construct
  source 1..20: mol_type = other RNA
tattccaggctggagtccca

SEQ ID NO: 9819 - RNA, 20 nt, synthetic construct
  source 1..20: mol_type = other RNA
gagttgattctcgtctgagc

SEQ ID NO: 9820 - RNA, 20 nt, synthetic construct
  source 1..20: mol_type = other RNA
gagcctcttattccaggctg

SEQ ID NO: 9821 - RNA, 20 nt, synthetic construct
  source 1..20: mol_type = other RNA
tctgagcacgtccaggggaa

SEQ ID NO: 9822 - RNA, 20 nt, synthetic construct
  source 1..20: mol_type = other RNA
gacgagaatcaactctgagc

SEQ ID NO: 9823 - RNA, 20 nt, synthetic construct
  source 1..20: mol_type = other RNA
gtggttcccctggacgtgct

SEQ ID NO: 9824 - RNA, 20 nt, synthetic construct
  source 1..20: mol_type = other RNA
tgttcccaaaccctcagtgg

SEQ ID NO: 9825 - RNA, 20 nt, synthetic construct
  source 1..20: mol_type = other RNA
cctgttcccaaaccctcagt

SEQ ID NO: 9826 - RNA, 20 nt, synthetic construct
  source 1..20: mol_type = other RNA
ctctcctgttcccaaaccct

SEQ ID NO: 9827 - RNA, 20 nt, synthetic construct
  source 1..20: mol_type = other RNA
ccctcactctcctgttccca

SEQ ID NO: 9828 - RNA, 20 nt, synthetic construct
  source 1..20: mol_type = other RNA
tctttcctgaacatccatcc

SEQ ID NO: 9829 - RNA, 20 nt, synthetic construct
  source 1..20: mol_type = other RNA
cctggacaagggcaccagcc

SEQ ID NO: 9830 - RNA, 20 nt, synthetic construct
  source 1..20: mol_type = other RNA
cccctggacaagggcaccag

SEQ ID NO: 9831 - RNA, 20 nt, synthetic construct
  source 1..20: mol_type = other RNA
gtcaggttcaggggtcctgg

SEQ ID NO: 9832 - RNA, 20 nt, synthetic construct
  source 1..20: mol_type = other RNA
aagccaggacccctgaacct

SEQ ID NO: 9833 - RNA, 20 nt, synthetic construct
  source 1..20: mol_type = other RNA
aatcacgctcccctttggaa

SEQ ID NO: 9834 - RNA, 20 nt, synthetic construct
  source 1..20: mol_type = other RNA
cctttggaagtgctcagccg

SEQ ID NO: 9835 - RNA, 20 nt, synthetic construct
  source 1..20: mol_type = other RNA
gccgatgagctcacaggcac

SEQ ID NO: 9836 - RNA, 20 nt, synthetic construct
  source 1..20: mol_type = other RNA
tcggctgagcacttccaaag

SEQ ID NO: 9837 - RNA, 20 nt, synthetic construct
  source 1..20: mol_type = other RNA
caggcacatgtcagtttgaa

SEQ ID NO: 9838 - RNA, 20 nt, synthetic construct
  source 1..20: mol_type = other RNA
atgaagcgcacctcaaagag

SEQ ID NO: 9839 - RNA, 20 nt, synthetic construct
  source 1..20: mol_type = other RNA
aagagcaccattttgcagct

SEQ ID NO: 9840 - RNA, 20 nt, synthetic construct
  source 1..20: mol_type = other RNA
ttgaggtgcgcttcatggag

SEQ ID NO: 9841 - RNA, 20 nt, synthetic construct
  source 1..20: mol_type = other RNA
gcatgtccagcctgcagttc

SEQ ID NO: 9842 - RNA, 20 nt, synthetic construct
  source 1..20: mol_type = other RNA
gggcagccactcagcatgtc

SEQ ID NO: 9843 - RNA, 20 nt, synthetic construct
  source 1..20: mol_type = other RNA
atgtcctagctgcaagggct

SEQ ID NO: 9844 - RNA, 20 nt, synthetic construct
  source 1..20: mol_type = other RNA
gaacatggtagggttgtggt

SEQ ID NO: 9845 - RNA, 20 nt, synthetic construct
  source 1..20: mol_type = other RNA
atgctggggcttcgcacgtg

SEQ ID NO: 9846 - RNA, 20 nt, synthetic construct
  source 1..20: mol_type = other RNA
cagggacactgtgaagatga

SEQ ID NO: 9847 - RNA, 20 nt, synthetic construct
  source 1..20: mol_type = other RNA
ttccatcttacaaatgagta

SEQ ID NO: 9848 - RNA, 20 nt, synthetic construct
  source 1..20: mol_type = other RNA
tttgtaagatggaaagagaa

SEQ ID NO: 9849 - RNA, 20 nt, synthetic construct
  source 1..20: mol_type = other RNA
gtttactcatttgtaagatg

SEQ ID NO: 9850 - RNA, 20 nt, synthetic construct
  source 1..20: mol_type = other RNA
gtgtagctaagtaaccacta

SEQ ID NO: 9851 - RNA, 20 nt, synthetic construct
  source 1..20: mol_type = other RNA
taagcccatggagggcattc

SEQ ID NO: 9852 - RNA, 20 nt, synthetic construct
  source 1..20: mol_type = other RNA
atgggcttaggagtcagaca

SEQ ID NO: 9853 - RNA, 20 nt, synthetic construct
  source 1..20: mol_type = other RNA
gaatgccctccatgggctta

SEQ ID NO: 9854 - RNA, 20 nt, synthetic construct
  source 1..20: mol_type = other RNA
ctatgcagccagcaggcaga

SEQ ID NO: 9855 - RNA, 20 nt, synthetic construct
  source 1..20: mol_type = other RNA
ccccagcccctccctatgca

SEQ ID NO: 9856 - RNA, 20 nt, synthetic construct
  source 1..20: mol_type = other RNA
aactccccccagcccctccc

SEQ ID NO: 9857 - RNA, 20 nt, synthetic construct
  source 1..20: mol_type = other RNA
ggccatagagcccctgcctc

SEQ ID NO: 9858 - RNA, 20 nt, synthetic construct
  source 1..20: mol_type = other RNA
atggcctgagatgctcaaac

SEQ ID NO: 9859 - RNA, 20 nt, synthetic construct
  source 1..20: mol_type = other RNA
ctgtctccatctctgggtgg

SEQ ID NO: 9860 - RNA, 20 nt, synthetic construct
  source 1..20: mol_type = other RNA
atctctgggtggaaagatgg

SEQ ID NO: 9861 - RNA, 20 nt, synthetic construct
  source 1..20: mol_type = other RNA
gggtggaaagatggtgtttt

SEQ ID NO: 9862 - RNA, 20 nt, synthetic construct
  source 1..20: mol_type = other RNA
gggaaaacaccatctttcca

SEQ ID NO: 9863 - RNA, 20 nt, synthetic construct
  source 1..20: mol_type = other RNA
gagaggttgaatggctctcc

SEQ ID NO: 9864 - RNA, 20 nt, synthetic construct
  source 1..20: mol_type = other RNA
gagccttagtttctcaggga

SEQ ID NO: 9865 - RNA, 20 nt, synthetic construct
  source 1..20: mol_type = other RNA
ctgagccttagtttctcagg

SEQ ID NO: 9866 - RNA, 20 nt, synthetic construct
  source 1..20: mol_type = other RNA
cccaaggtcacacagctggt

SEQ ID NO: 9867 - RNA, 20 nt, synthetic construct
  source 1..20: mol_type = other RNA
caaggtcacacagctggtca

SEQ ID NO: 9868 - RNA, 20 nt, synthetic construct
  source 1..20: mol_type = other RNA
gcagctgaccagctgtgtga

SEQ ID NO: 9869 - RNA, 20 nt, synthetic construct
  source 1..20: mol_type = other RNA
actctgcagctgaccagctg

SEQ ID NO: 9870 - RNA, 20 nt, synthetic construct
  source 1..20: mol_type = other RNA
tgtgttctcaactctgcagc

SEQ ID NO: 9871 - RNA, 20 nt, synthetic construct
  source 1..20: mol_type = other RNA
ggccagcatctctttttttc

SEQ ID NO: 9872 - RNA, 20 nt, synthetic construct
  source 1..20: mol_type = other RNA
ttttttctttgagttgtttc

SEQ ID NO: 9873 - RNA, 20 nt, synthetic construct
  source 1..20: mol_type = other RNA
aagaaaaaaagagatgctgg

SEQ ID NO: 9874 - RNA, 20 nt, synthetic construct
  source 1..20: mol_type = other RNA
tgcctcagaccttaaagaga

SEQ ID NO: 9875 - RNA, 20 nt, synthetic construct
  source 1..20: mol_type = other RNA
gaccttaaagagagagggtc

SEQ ID NO: 9876 - RNA, 20 nt, synthetic construct
  source 1..20: mol_type = other RNA
ttaaggtctgaggcaagagc

SEQ ID NO: 9877 - RNA, 20 nt, synthetic construct
  source 1..20: mol_type = other RNA
ctttaaggtctgaggcaaga

SEQ ID NO: 9878 - RNA, 20 nt, synthetic construct
  source 1..20: mol_type = other RNA
ctctttaaggtctgaggcaa

SEQ ID NO: 9879 - RNA, 20 nt, synthetic construct
  source 1..20: mol_type = other RNA
agtgcccatccccatcagac

SEQ ID NO: 9880 - RNA, 20 nt, synthetic construct
  source 1..20: mol_type = other RNA
gtctccagtgcccatcccca

SEQ ID NO: 9881 - RNA, 20 nt, synthetic construct
  source 1..20: mol_type = other RNA
gatgtgaaatgctgggatgc

SEQ ID NO: 9882 - RNA, 20 nt, synthetic construct
  source 1..20: mol_type = other RNA
gccccaggctgcagctccca

SEQ ID NO: 9883 - RNA, 20 nt, synthetic construct
  source 1..20: mol_type = other RNA
cactgggaggtggaggacct

SEQ ID NO: 9884 - RNA, 20 nt, synthetic construct
  source 1..20: mol_type = other RNA
cagtgggagctgcagcctgg

SEQ ID NO: 9885 - RNA, 20 nt, synthetic construct
  source 1..20: mol_type = other RNA
acctcccagtgggagctgca

SEQ ID NO: 9886 - RNA, 20 nt, synthetic construct
  source 1..20: mol_type = other RNA
gcacaggcggcttgtgggtg

SEQ ID NO: 9887 - RNA, 20 nt, synthetic construct
  source 1..20: mol_type = other RNA
tggcctcagcacaggcggct

SEQ ID NO: 9888 - RNA, 20 nt, synthetic construct
  source 1..20: mol_type = other RNA
ctgtggcccacgcactggtt

SEQ ID NO: 9889 - RNA, 20 nt, synthetic construct
  source 1..20: mol_type = other RNA
ttgactttgcattccagacc

SEQ ID NO: 9890 - RNA, 20 nt, synthetic construct
  source 1..20: mol_type = other RNA
ggagcaggtgaagaggcccg

SEQ ID NO: 9891 - RNA, 20 nt, synthetic construct
  source 1..20: mol_type = other RNA
tgaggggccgggattccatg

SEQ ID NO: 9892 - RNA, 20 nt, synthetic construct
  source 1..20: mol_type = other RNA
tcacctgctcctgaggggcc

SEQ ID NO: 9893 - RNA, 20 nt, synthetic construct
  source 1..20: mol_type = other RNA
cgggcctcttcacctgctcc

SEQ ID NO: 9894 - RNA, 20 nt, synthetic construct
  source 1..20: mol_type = other RNA
cctgcacagcttttctgtgt

SEQ ID NO: 9895 - RNA, 20 nt, synthetic construct
  source 1..20: mol_type = other RNA
tgcacagcttttctgtgtca

SEQ ID NO: 9896 - RNA, 20 nt, synthetic construct
  source 1..20: mol_type = other RNA
gtgtggctgggtctgttttt

SEQ ID NO: 9897 - RNA, 20 nt, synthetic construct
  source 1..20: mol_type = other RNA
acttggagtagaatgtgcat

SEQ ID NO: 9898 - RNA, 20 nt, synthetic construct
  source 1..20: mol_type = other RNA
aagtggagtggggtacccag

SEQ ID NO: 9899 - RNA, 20 nt, synthetic construct
  source 1..20: mol_type = other RNA
gaaaaaaatagatcaatcaa

SEQ ID NO: 9900 - RNA, 20 nt, synthetic construct
  source 1..20: mol_type = other RNA
aattcctgggctcaagcaat

SEQ ID NO: 9901 - RNA, 20 nt, synthetic construct
  source 1..20: mol_type = other RNA
agcaatcctctggtctcagc

SEQ ID NO: 9902 - RNA, 20 nt, synthetic construct
  source 1..20: mol_type = other RNA
ggtctcagcctccccaagtg

SEQ ID NO: 9903 - RNA, 20 nt, synthetic construct
  source 1..20: mol_type = other RNA
gcctccccaagtgttgggat

SEQ ID NO: 9904 - RNA, 20 nt, synthetic construct
  source 1..20: mol_type = other RNA
ccaagtgttgggattatagg

SEQ ID NO: 9905 - RNA, 20 nt, synthetic construct
  source 1..20: mol_type = other RNA
tgcctataatcccaacactt

SEQ ID NO: 9906 - RNA, 20 nt, synthetic construct
  source 1..20: mol_type = other RNA
ctgatctatttaacaaacct

SEQ ID NO: 9907 - RNA, 20 nt, synthetic construct
  source 1..20: mol_type = other RNA
gatctatttaacaaacctgc

SEQ ID NO: 9908 - RNA, 20 nt, synthetic construct
  source 1..20: mol_type = other RNA
cagcaggtttgttaaataga

SEQ ID NO: 9909 - RNA, 20 nt, synthetic construct
  source 1..20: mol_type = other RNA
gggtcaggagcagcactggg

SEQ ID NO: 9910 - RNA, 20 nt, synthetic construct
  source 1..20: mol_type = other RNA
tgaccctgagaccctcccag

SEQ ID NO: 9911 - RNA, 20 nt, synthetic construct
  source 1..20: mol_type = other RNA
gaggacacagagctcactca

SEQ ID NO: 9912 - RNA, 20 nt, synthetic construct
  source 1..20: mol_type = other RNA
gagcccagtgctgctcctga

SEQ ID NO: 9913 - RNA, 20 nt, synthetic construct
  source 1..20: mol_type = other RNA
gtgtcctcagagcccagtgc

SEQ ID NO: 9914 - RNA, 20 nt, synthetic construct
  source 1..20: mol_type = other RNA
ctcagccgtgacccagaggg

SEQ ID NO: 9915 - RNA, 20 nt, synthetic construct
  source 1..20: mol_type = other RNA
gccgtgacccagagggggtg

SEQ ID NO: 9916 - RNA, 20 nt, synthetic construct
  source 1..20: mol_type = other RNA
gggtcacggctgagtgagct

SEQ ID NO: 9917 - RNA, 20 nt, synthetic construct
  source 1..20: mol_type = other RNA
ggcaccccctctgggtcacg

SEQ ID NO: 9918 - RNA, 20 nt, synthetic construct
  source 1..20: mol_type = other RNA
gcagggccttttcttgcctt

SEQ ID NO: 9919 - RNA, 20 nt, synthetic construct
  source 1..20: mol_type = other RNA
ggtttctagaaggcccggct

SEQ ID NO: 9920 - RNA, 20 nt, synthetic construct
  source 1..20: mol_type = other RNA
ccttaaaagccagtaggagc

SEQ ID NO: 9921 - RNA, 20 nt, synthetic construct
  source 1..20: mol_type = other RNA
ttaaaagccagtaggagctc

SEQ ID NO: 9922 - RNA, 20 nt, synthetic construct
  source 1..20: mol_type = other RNA
tactggcttttaaggagagt

SEQ ID NO: 9923 - RNA, 20 nt, synthetic construct
  source 1..20: mol_type = other RNA
tcaaaaggcagccctaagga

SEQ ID NO: 9924 - RNA, 20 nt, synthetic construct
  source 1..20: mol_type = other RNA
aaaggcagccctaaggagtc

SEQ ID NO: 9925 - RNA, 20 nt, synthetic construct
  source 1..20: mol_type = other RNA
ttagggctgccttttgagga

SEQ ID NO: 9926 - RNA, 20 nt, synthetic construct
  source 1..20: mol_type = other RNA
taaatgaactcagagtcagt

SEQ ID NO: 9927 - RNA, 20 nt, synthetic construct
  source 1..20: mol_type = other RNA
gagtcagttttaaaatgcaa

SEQ ID NO: 9928 - RNA, 20 nt, synthetic construct
  source 1..20: mol_type = other RNA
gagttcatttaagagtggac

SEQ ID NO: 9929 - RNA, 20 nt, synthetic construct
  source 1..20: mol_type = other RNA
agagcaaaagacagtcttgg

SEQ ID NO: 9930 - RNA, 20 nt, synthetic construct
  source 1..20: mol_type = other RNA
aggaatgcaccatccagacc

SEQ ID NO: 9931 - RNA, 20 nt, synthetic construct
  source 1..20: mol_type = other RNA
cgaggaatgcaccatccaga

SEQ ID NO: 9932 - RNA, 20 nt, synthetic construct
  source 1..20: mol_type = other RNA
gtgtacccagggcaagtgga

SEQ ID NO: 9933 - RNA, 20 nt, synthetic construct
  source 1..20: mol_type = other RNA
tcctggcactggggagggat

SEQ ID NO: 9934 - RNA, 20 nt, synthetic construct
  source 1..20: mol_type = other RNA
ccagtgccaggaagagcacc

SEQ ID NO: 9935 - RNA, 20 nt, synthetic construct
  source 1..20: mol_type = other RNA
tgggcctgtatccctcccca

SEQ ID NO: 9936 - RNA, 20 nt, synthetic construct
  source 1..20: mol_type = other RNA
ctcctggagcatctatttta

SEQ ID NO: 9937 - RNA, 20 nt, synthetic construct
  source 1..20: mol_type = other RNA
tggagcatctattttagtgg

SEQ ID NO: 9938 - RNA, 20 nt, synthetic construct
  source 1..20: mol_type = other RNA
aggagggagaacagcatgtc

SEQ ID NO: 9939 - RNA, 20 nt, synthetic construct
  source 1..20: mol_type = other RNA
actaaaatagatgctccagg

SEQ ID NO: 9940 - RNA, 20 nt, synthetic construct
  source 1..20: mol_type = other RNA
atattaatggtttgttttct

SEQ ID NO: 9941 - RNA, 20 nt, synthetic construct
  source 1..20: mol_type = other RNA
atcgcatcttttcagtactc

SEQ ID NO: 9942 - RNA, 20 nt, synthetic construct
  source 1..20: mol_type = other RNA
caccccattcccttccttgc

SEQ ID NO: 9943 - RNA, 20 nt, synthetic construct
  source 1..20: mol_type = other RNA
cccaccccattcccttcctt

SEQ ID NO: 9944 - RNA, 20 nt, synthetic construct
  source 1..20: mol_type = other RNA
ctcccaccccattcccttcc

SEQ ID NO: 9945 - RNA, 20 nt, synthetic construct
  source 1..20: mol_type = other RNA
tgacctctctcccaccccat

SEQ ID NO: 9946 - RNA, 20 nt, synthetic construct
  source 1..20: mol_type = other RNA
cctgacctctctcccacccc

SEQ ID NO: 9947 - RNA, 20 nt, synthetic construct
  source 1..20: mol_type = other RNA
ctgacaaggtggacgaaaca

SEQ ID NO: 9948 - RNA, 20 nt, synthetic construct
  source 1..20: mol_type = other RNA
tggcctgtttcgtccacctt

SEQ ID NO: 9949 - RNA, 20 nt, synthetic construct
  source 1..20: mol_type = other RNA
gcctcatggcctgtttcgtc

SEQ ID NO: 9950 - RNA, 20 nt, synthetic construct
  source 1..20: mol_type = other RNA
ctgcacatccccacctgggg

SEQ ID NO: 9951 - RNA, 20 nt, synthetic construct
  source 1..20: mol_type = other RNA
ggtttcctggtactccctgc

SEQ ID NO: 9952 - RNA, 20 nt, synthetic construct
  source 1..20: mol_type = other RNA
ctggtttcctggtactccct

SEQ ID NO: 9953 - RNA, 20 nt, synthetic construct
  source 1..20: mol_type = other RNA
taactattcccacctctctg

SEQ ID NO: 9954 - RNA, 20 nt, synthetic construct
  source 1..20: mol_type = other RNA
gaggggacagggccaagtca

SEQ ID NO: 9955 - RNA, 20 nt, synthetic construct
  source 1..20: mol_type = other RNA
gaggcaccccccatctcata

SEQ ID NO: 9956 - RNA, 20 nt, synthetic construct
  source 1..20: mol_type = other RNA
cctgacttggccctgtcccc

SEQ ID NO: 9957 - RNA, 20 nt, synthetic construct
  source 1..20: mol_type = other RNA
ggtctcacctgacttggccc

SEQ ID NO: 9958 - RNA, 20 nt, synthetic construct
  source 1..20: mol_type = other RNA
ctgctgactgtgaccctcag

SEQ ID NO: 9959 - RNA, 20 nt, synthetic construct
  source 1..20: mol_type = other RNA
gaggagtgtggtctggcctg

SEQ ID NO: 9960 - RNA, 20 nt, synthetic construct
  source 1..20: mol_type = other RNA
gaggccagacccctgcatgg

SEQ ID NO: 9961 - RNA, 20 nt, synthetic construct
  source 1..20: mol_type = other RNA
tctgaggccagacccctgca

SEQ ID NO: 9962 - RNA, 20 nt, synthetic construct
  source 1..20: mol_type = other RNA
cactgtggcctagctgctga

SEQ ID NO: 9963 - RNA, 20 nt, synthetic construct
  source 1..20: mol_type = other RNA
ctgtggcctagctgctgagc

SEQ ID NO: 9964 - RNA, 20 nt, synthetic construct
  source 1..20: mol_type = other RNA
gcagctaggccacagtgaga

SEQ ID NO: 9965 - RNA, 20 nt, synthetic construct
  source 1..20: mol_type = other RNA
gctcagcagctaggccacag

SEQ ID NO: 9966 - RNA, 20 nt, synthetic construct
  source 1..20: mol_type = other RNA
tctcagctcagcagctaggc

SEQ ID NO: 9967 - RNA, 20 nt, synthetic construct
  source 1..20: mol_type = other RNA
ctgcttctgcccaaggtcct

SEQ ID NO: 9968 - RNA, 20 nt, synthetic construct
  source 1..20: mol_type = other RNA
agtctccctgcttctgccca

SEQ ID NO: 9969 - RNA, 20 nt, synthetic construct
  source 1..20: mol_type = other RNA
ctccagtctccctgcttctg

SEQ ID NO: 9970 - RNA, 20 nt, synthetic construct
  source 1..20: mol_type = other RNA
accgcctccctccagtctcc

SEQ ID NO: 9971 - RNA, 20 nt, synthetic construct
  source 1..20: mol_type = other RNA
ggctggagtctgaagggagc

SEQ ID NO: 9972 - RNA, 20 nt, synthetic construct
  source 1..20: mol_type = other RNA
agcctgagccccgccccaac

SEQ ID NO: 9973 - RNA, 20 nt, synthetic construct
  source 1..20: mol_type = other RNA
cttcagactccagcctgagc

SEQ ID NO: 9974 - RNA, 20 nt, synthetic construct
  source 1..20: mol_type = other RNA
cacccacatccacccaccag

SEQ ID NO: 9975 - RNA, 20 nt, synthetic construct
  source 1..20: mol_type = other RNA
cccacccacatccacccacc

SEQ ID NO: 9976 - RNA, 20 nt, synthetic construct
  source 1..20: mol_type = other RNA
ccctctcccacccacatcca

SEQ ID NO: 9977 - RNA, 20 nt, synthetic construct
  source 1..20: mol_type = other RNA
ggcccctggacagatggagt

SEQ ID NO: 9978 - RNA, 20 nt, synthetic construct
  source 1..20: mol_type = other RNA
atctgtccaggggcccgagc

SEQ ID NO: 9979 - RNA, 20 nt, synthetic construct
  source 1..20: mol_type = other RNA
gaaactgatggccccatagc

SEQ ID NO: 9980 - RNA, 20 nt, synthetic construct
  source 1..20: mol_type = other RNA
tccctctgaaactgatggcc

SEQ ID NO: 9981 - RNA, 20 nt, synthetic construct
  source 1..20: mol_type = other RNA
acggccctcaaaccaggcat

SEQ ID NO: 9982 - RNA, 20 nt, synthetic construct
  source 1..20: mol_type = other RNA
aaccaggcatgaagcaggag

SEQ ID NO: 9983 - RNA, 20 nt, synthetic construct
  source 1..20: mol_type = other RNA
tgcttcatgcctggtttgag

SEQ ID NO: 9984 - RNA, 20 nt, synthetic construct
  source 1..20: mol_type = other RNA
cgtgtttggtcagccatggt

SEQ ID NO: 9985 - RNA, 20 nt, synthetic construct
  source 1..20: mol_type = other RNA
cacccaggcggttctgcacc

SEQ ID NO: 9986 - RNA, 20 nt, synthetic construct
  source 1..20: mol_type = other RNA
caccccgcacctcccaccca

SEQ ID NO: 9987 - RNA, 20 nt, synthetic construct
  source 1..20: mol_type = other RNA
gagccagcgagggccgtctg

SEQ ID NO: 9988 - RNA, 20 nt, synthetic construct
  source 1..20: mol_type = other RNA
gagcccatttgggacacaac

SEQ ID NO: 9989 - RNA, 20 nt, synthetic construct
  source 1..20: mol_type = other RNA
ctggctcagagcccatttgg

SEQ ID NO: 9990 - RNA, 20 nt, synthetic construct
  source 1..20: mol_type = other RNA
cagaaggatgtcggagggag

SEQ ID NO: 9991 - RNA, 20 nt, synthetic construct
  source 1..20: mol_type = other RNA
gacatccttctgtgaggcca

SEQ ID NO: 9992 - RNA, 20 nt, synthetic construct
  source 1..20: mol_type = other RNA
ctccgacatccttctgtgag

SEQ ID NO: 9993 - RNA, 20 nt, synthetic construct
  source 1..20: mol_type = other RNA
ggctctggcaggtgaccgtg

SEQ ID NO: 9994 - RNA, 20 nt, synthetic construct
  source 1..20: mol_type = other RNA
ggcaggtgaccgtggcctgc

SEQ ID NO: 9995 - RNA, 20 nt, synthetic construct
  source 1..20: mol_type = other RNA
caggccacggtcacctgcca

SEQ ID NO: 9996 - RNA, 20 nt, synthetic construct
  source 1..20: mol_type = other RNA
tcgcaggccacggtcacctg

SEQ ID NO: 9997 - RNA, 20 nt, synthetic construct
  source 1..20: mol_type = other RNA
ctgggacctcccacgtcctg

SEQ ID NO: 9998 - RNA, 20 nt, synthetic construct
  source 1..20: mol_type = other RNA
cacgtcctgggggcctacgc

SEQ ID NO: 9999 - RNA, 20 nt, synthetic construct
  source 1..20: mol_type = other RNA
tgactacacacgtgttgtct

SEQ ID NO: 10000 - RNA, 20 nt, synthetic construct
  source 1..20: mol_type = other RNA
ggcagcagatggcaacggct

SEQ ID NO: 10001 - RNA, 20 nt, synthetic construct
  source 1..20: mol_type = other RNA
caggagctccagtgacagcc

SEQ ID NO: 10002 - RNA, 20 nt, synthetic construct
  source 1..20: mol_type = other RNA
tgggaggcctgcgccaggtg

SEQ ID NO: 10003 - RNA, 20 nt, synthetic construct
  source 1..20: mol_type = other RNA
agtgacagccccatcccagg

SEQ ID NO: 10004 - RNA, 20 nt, synthetic construct
  source 1..20: mol_type = other RNA
ccagacacccatcctgggat

SEQ ID NO: 10005 - RNA, 20 nt, synthetic construct
  source 1..20: mol_type = other RNA
gccccagcccttgaccctcc

SEQ ID NO: 10006 - RNA, 20 nt, synthetic construct
  source 1..20: mol_type = other RNA
ctcagccctccatggcctgg

SEQ ID NO: 10007 - RNA, 20 nt, synthetic construct
  source 1..20: mol_type = other RNA
cagccctccatggcctggca

SEQ ID NO: 10008 - RNA, 20 nt, synthetic construct
  source 1..20: mol_type = other RNA
gccctccatggcctggcacg

SEQ ID NO: 10009 - RNA, 20 nt, synthetic construct
  source 1..20: mol_type = other RNA
atggcctggcacgaggggat

SEQ ID NO: 10010 - RNA, 20 nt, synthetic construct
  source 1..20: mol_type = other RNA
tgccaggccatggagggctg

SEQ ID NO: 10011 - RNA, 20 nt, synthetic construct
  source 1..20: mol_type = other RNA
agggccaggccagcagcccc

SEQ ID NO: 10012 - RNA, 20 nt, synthetic construct
  source 1..20: mol_type = other RNA
ttgcctggaactcactcact

SEQ ID NO: 10013 - RNA, 20 nt, synthetic construct
  source 1..20: mol_type = other RNA
ctcactctgggtgcctcctc

SEQ ID NO: 10014 - RNA, 20 nt, synthetic construct
  source 1..20: mol_type = other RNA
ctctgggtgcctcctcccca

SEQ ID NO: 10015 - RNA, 20 nt, synthetic construct
  source 1..20: mol_type = other RNA
gggtgcctcctccccaggtg

SEQ ID NO: 10016 - RNA, 20 nt, synthetic construct
  source 1..20: mol_type = other RNA
tccccaggtggaggtgccag

SEQ ID NO: 10017 - RNA, 20 nt, synthetic construct
  source 1..20: mol_type = other RNA
ccaggtggaggtgccaggaa

SEQ ID NO: 10018 - RNA, 20 nt, synthetic construct
  source 1..20: mol_type = other RNA
acctggggaggaggcaccca

SEQ ID NO: 10019 - RNA, 20 nt, synthetic construct
  source 1..20: mol_type = other RNA
ctccctcactgtggggcatt

SEQ ID NO: 10020 - RNA, 20 nt, synthetic construct
  source 1..20: mol_type = other RNA
ctcactgtggggcatttcac

SEQ ID NO: 10021 - RNA, 20 nt, synthetic construct
  source 1..20: mol_type = other RNA
ctgtggggcatttcaccatt

SEQ ID NO: 10022 - RNA, 20 nt, synthetic construct
  source 1..20: mol_type = other RNA
acctgtttgaatggtgaaat

SEQ ID NO: 10023 - RNA, 20 nt, synthetic construct
  source 1..20: mol_type = other RNA
ggtgctgccagctgctccca

SEQ ID NO: 10024 - RNA, 20 nt, synthetic construct
  source 1..20: mol_type = other RNA
caatgtgccgatgtccgtgg

SEQ ID NO: 10025 - RNA, 20 nt, synthetic construct
  source 1..20: mol_type = other RNA
ataaaagtcattctgcccac

SEQ ID NO: 10026 - RNA, 20 nt, synthetic construct
  source 1..20: mol_type = other RNA
tgttccgtgccaggcattca

SEQ ID NO: 10027 - RNA, 20 nt, synthetic construct
  source 1..20: mol_type = other RNA
ggtctccaccaaggaggcag

SEQ ID NO: 10028 - RNA, 20 nt, synthetic construct
  source 1..20: mol_type = other RNA
accaaggaggcaggattctt

SEQ ID NO: 10029 - RNA, 20 nt, synthetic construct
  source 1..20: mol_type = other RNA
ttggtggagacctgaggatt

SEQ ID NO: 10030 - RNA, 20 nt, synthetic construct
  source 1..20: mol_type = other RNA
cctatccatgggaagaatcc

SEQ ID NO: 10031 - RNA, 20 nt, synthetic construct
  source 1..20: mol_type = other RNA
ccccccaacgatgtttgtcc

SEQ ID NO: 10032 - RNA, 20 nt, synthetic construct
  source 1..20: mol_type = other RNA
tctccagctaactgtggaga

SEQ ID NO: 10033 - RNA, 20 nt, synthetic construct
  source 1..20: mol_type = other RNA
agctaactgtggagaagccc

SEQ ID NO: 10034 - RNA, 20 nt, synthetic construct
  source 1..20: mol_type = other RNA
acagttagctggagatgagg

SEQ ID NO: 10035 - RNA, 20 nt, synthetic construct
  source 1..20: mol_type = other RNA
ctgattaatggaggcttagc

SEQ ID NO: 10036 - RNA, 20 nt, synthetic construct
  source 1..20: mol_type = other RNA
attaatcagggagcccccag

SEQ ID NO: 10037 - RNA, 20 nt, synthetic construct
  source 1..20: mol_type = other RNA
ggctagatgccatccagaaa

SEQ ID NO: 10038 - RNA, 20 nt, synthetic construct
  source 1..20: mol_type = other RNA
agcctctggctagatgccat

SEQ ID NO: 10039 - RNA, 20 nt, synthetic construct
  source 1..20: mol_type = other RNA
ggaaaccaaggcacagcctg

SEQ ID NO: 10040 - RNA, 20 nt, synthetic construct
  source 1..20: mol_type = other RNA
gctctatgccaggctgtgct

SEQ ID NO: 10041 - RNA, 20 nt, synthetic construct
  source 1..20: mol_type = other RNA
atgccaggctgtgctagcaa

SEQ ID NO: 10042 - RNA, 20 nt, synthetic construct
  source 1..20: mol_type = other RNA
ccgcaggccacctttgggtg

SEQ ID NO: 10043 - RNA, 20 nt, synthetic construct
  source 1..20: mol_type = other RNA
gcagtgtgcagtggtgcatg

SEQ ID NO: 10044 - RNA, 20 nt, synthetic construct
  source 1..20: mol_type = other RNA
gccaacccgctccactaccc

SEQ ID NO: 10045 - RNA, 20 nt, synthetic construct
  source 1..20: mol_type = other RNA
actacccggcagggtacaca

SEQ ID NO: 10046 - RNA, 20 nt, synthetic construct
  source 1..20: mol_type = other RNA
gtgaagtaggggtgcgaatg

SEQ ID NO: 10047 - RNA, 20 nt, synthetic construct
  source 1..20: mol_type = other RNA
ggttccaggtttcttcctct

SEQ ID NO: 10048 - RNA, 20 nt, synthetic construct
  source 1..20: mol_type = other RNA
cacagcaggaactgagccag

SEQ ID NO: 10049 - RNA, 20 nt, synthetic construct
  source 1..20: mol_type = other RNA
gttcctgctgtgtgagcttg

SEQ ID NO: 10050 - RNA, 20 nt, synthetic construct
  source 1..20: mol_type = other RNA
gaagccaagcctcttcttac

SEQ ID NO: 10051 - RNA, 20 nt, synthetic construct
  source 1..20: mol_type = other RNA
tcttacttcacccggctggg

SEQ ID NO: 10052 - RNA, 20 nt, synthetic construct
  source 1..20: mol_type = other RNA
tcatttttacgggtaacagt

SEQ ID NO: 10053 - RNA, 20 nt, synthetic construct
  source 1..20: mol_type = other RNA
tttttacgggtaacagtgag

SEQ ID NO: 10054 - RNA, 20 nt, synthetic construct
  source 1..20: mol_type = other RNA
ctgttacccgtaaaaatgag

SEQ ID NO: 10055 - RNA, 20 nt, synthetic construct
  source 1..20: mol_type = other RNA
gtgagtgatggcagaacgat

SEQ ID NO: 10056 - RNA, 20 nt, synthetic construct
  source 1..20: mol_type = other RNA
ccgagcttcctggtctgtgt

SEQ ID NO: 10057 - RNA, 20 nt, synthetic construct
  source 1..20: mol_type = other RNA
gccaggccagtgaatcaggc

SEQ ID NO: 10058 - RNA, 20 nt, synthetic construct
  source 1..20: mol_type = other RNA
cccgaccatgccttagaagc

SEQ ID NO: 10059 - RNA, 20 nt, synthetic construct
  source 1..20: mol_type = other RNA
cccccgaccatgccttagaa

SEQ ID NO: 10060 - RNA, 20 nt, synthetic construct
  source 1..20: mol_type = other RNA
ttgagcaccagccccaccca

SEQ ID NO: 10061 - RNA, 20 nt, synthetic construct
  source 1..20: mol_type = other RNA
aggagggacagttgttggcc

SEQ ID NO: 10062 - RNA, 20 nt, synthetic construct
  source 1..20: mol_type = other RNA
ctgttgcctttttacagcca

SEQ ID NO: 10063 - RNA, 20 nt, synthetic construct
  source 1..20: mol_type = other RNA
gttgcctttttacagccaac

SEQ ID NO: 10064 - RNA, 20 nt, synthetic construct
  source 1..20: mol_type = other RNA
tgcatagacttgactgccta

SEQ ID NO: 10065 - RNA, 20 nt, synthetic construct
  source 1..20: mol_type = other RNA
actattcaacaaacttaccc

SEQ ID NO: 10066 - RNA, 20 nt, synthetic construct
  source 1..20: mol_type = other RNA
tcaaatacttggcttactca

SEQ ID NO: 10067 - RNA, 20 nt, synthetic construct
  source 1..20: mol_type = other RNA
agataaaagtactcatcaaa

SEQ ID NO: 10068 - RNA, 20 nt, synthetic construct
  source 1..20: mol_type = other RNA
ttgtgcctatcctaggaatg

SEQ ID NO: 10069 - RNA, 20 nt, synthetic construct
  source 1..20: mol_type = other RNA
cctgaccaccctgacagtca

SEQ ID NO: 10070 - RNA, 20 nt, synthetic construct
  source 1..20: mol_type = other RNA
tccttggtgacaggtgccct

SEQ ID NO: 10071 - RNA, 20 nt, synthetic construct
  source 1..20: mol_type = other RNA
ttggtgacaggtgccctaca

SEQ ID NO: 10072 - RNA, 20 nt, synthetic construct
  source 1..20: mol_type = other RNA
agatgctctgttgtcctgac

SEQ ID NO: 10073 - RNA, 20 nt, synthetic construct
  source 1..20: mol_type = other RNA
gttgtcctgacctcccaatg

SEQ ID NO: 10074 - RNA, 20 nt, synthetic construct
  source 1..20: mol_type = other RNA
caatgcccttttcattcttt

SEQ ID NO: 10075 - RNA, 20 nt, synthetic construct
  source 1..20: mol_type = other RNA
ccagtacctggcacacagcc

SEQ ID NO: 10076 - RNA, 20 nt, synthetic construct
  source 1..20: mol_type = other RNA
ggccaggctgtgtgccaggt

SEQ ID NO: 10077 - RNA, 20 nt, synthetic construct
  source 1..20: mol_type = other RNA
ttacagaagcatctggcact

SEQ ID NO: 10078 - RNA, 20 nt, synthetic construct
  source 1..20: mol_type = other RNA
gattgggtgcaatggctcac

SEQ ID NO: 10079 - RNA, 20 nt, synthetic construct
  source 1..20: mol_type = other RNA
cacctgtaatctcagtactt

SEQ ID NO: 10080 - RNA, 20 nt, synthetic construct
  source 1..20: mol_type = other RNA
gtactttgggaggctgaggc

SEQ ID NO: 10081 - RNA, 20 nt, synthetic construct
  source 1..20: mol_type = other RNA
caaagtactgagattacagg

SEQ ID NO: 10082 - RNA, 20 nt, synthetic construct
  source 1..20: mol_type = other RNA
gcctcccaaagtactgagat

SEQ ID NO: 10083 - RNA, 20 nt, synthetic construct
  source 1..20: mol_type = other RNA
tgcctcagcctcccaaagta

SEQ ID NO: 10084 - RNA, 20 nt, synthetic construct
  source 1..20: mol_type = other RNA
ctgttgcccagggtcttgaa

SEQ ID NO: 10085 - RNA, 20 nt, synthetic construct
  source 1..20: mol_type = other RNA
ataaaaaaatttaaaagatt

SEQ ID NO: 10086 - RNA, 20 nt, synthetic construct
  source 1..20: mol_type = other RNA
ctaatcttttaaattttttt

SEQ ID NO: 10087 - RNA, 20 nt, synthetic construct
  source 1..20: mol_type = other RNA
ggaggctgatatgggaggct

SEQ ID NO: 10088 - RNA, 20 nt, synthetic construct
  source 1..20: mol_type = other RNA
tgagtagccgggaccacagg

SEQ ID NO: 10089 - RNA, 20 nt, synthetic construct
  source 1..20: mol_type = other RNA
catatcagcctcctgagtag

SEQ ID NO: 10090 - RNA, 20 nt, synthetic construct
  source 1..20: mol_type = other RNA
agcaagcctcccatatcagc

SEQ ID NO: 10091 - RNA, 20 nt, synthetic construct
  source 1..20: mol_type = other RNA
cagctcaagcaagcctccca

SEQ ID NO: 10092 - RNA, 20 nt, synthetic construct
  source 1..20: mol_type = other RNA
gcctcccagctcaagcaagc

SEQ ID NO: 10093 - RNA, 20 nt, synthetic construct
  source 1..20: mol_type = other RNA
ctgcaccctcagcctcccag

SEQ ID NO: 10094 - RNA, 20 nt, synthetic construct
  source 1..20: mol_type = other RNA
gtaacccaggctgcagtgca

SEQ ID NO: 10095 - RNA, 20 nt, synthetic construct
  source 1..20: mol_type = other RNA
aggccctccactctaaggct

SEQ ID NO: 10096 - RNA, 20 nt, synthetic construct
  source 1..20: mol_type = other RNA
actctaaggctggtgaatat

SEQ ID NO: 10097 - RNA, 20 nt, synthetic construct
  source 1..20: mol_type = other RNA
aaggctggtgaatatagctg

SEQ ID NO: 10098 - RNA, 20 nt, synthetic construct
  source 1..20: mol_type = other RNA
ctctctctagacagcccatg

SEQ ID NO: 10099 - RNA, 20 nt, synthetic construct
  source 1..20: mol_type = other RNA
ctctctagacagcccatgtc

SEQ ID NO: 10100 - RNA, 20 nt, synthetic construct
  source 1..20: mol_type = other RNA
ctctagacagcccatgtcat

SEQ ID NO: 10101 - RNA, 20 nt, synthetic construct
  source 1..20: mol_type = other RNA
ctagacagcccatgtcataa

SEQ ID NO: 10102 - RNA, 20 nt, synthetic construct
  source 1..20: mol_type = other RNA
agacagcccatgtcataagg

SEQ ID NO: 10103 - RNA, 20 nt, synthetic construct
  source 1..20: mol_type = other RNA
ggcaaaattcctcccagatt

SEQ ID NO: 10104 - RNA, 20 nt, synthetic construct
  source 1..20: mol_type = other RNA
cagattacattttctgacaa

SEQ ID NO: 10105 - RNA, 20 nt, synthetic construct
  source 1..20: mol_type = other RNA
tgaatgctttccatatatga

SEQ ID NO: 10106 - RNA, 20 nt, synthetic construct
  source 1..20: mol_type = other RNA
gcccgttggaacctaggcct

SEQ ID NO: 10107 - RNA, 20 nt, synthetic construct
  source 1..20: mol_type = other RNA
ctctccttcccctccacaga

SEQ ID NO: 10108 - RNA, 20 nt, synthetic construct
  source 1..20: mol_type = other RNA
ctccttcccctccacagaat

SEQ ID NO: 10109 - RNA, 20 nt, synthetic construct
  source 1..20: mol_type = other RNA
ccttcccctccacagaatca

SEQ ID NO: 10110 - RNA, 20 nt, synthetic construct
  source 1..20: mol_type = other RNA
ttcccctccacagaatcaag

SEQ ID NO: 10111 - RNA, 20 nt, synthetic construct
  source 1..20: mol_type = other RNA
acagaatcaagtatcagctg

SEQ ID NO: 10112 - RNA, 20 nt, synthetic construct
  source 1..20: mol_type = other RNA
aaccagctgatacttgattc

SEQ ID NO: 10113 - RNA, 20 nt, synthetic construct
  source 1..20: mol_type = other RNA
gtgatgttggaacaacttgg

SEQ ID NO: 10114 - RNA, 20 nt, synthetic construct
  source 1..20: mol_type = other RNA
gcaagaaccaagttgttcca

SEQ ID NO: 10115 - RNA, 20 nt, synthetic construct
  source 1..20: mol_type = other RNA
ccgatccctggtgaccacct

SEQ ID NO: 10116 - RNA, 20 nt, synthetic construct
  source 1..20: mol_type = other RNA
catgggtccccttccctatt

SEQ ID NO: 10117 - RNA, 20 nt, synthetic construct
  source 1..20: mol_type = other RNA
ttcctagtggccagcgttgc

SEQ ID NO: 10118 - RNA, 20 nt, synthetic construct
  source 1..20: mol_type = other RNA
gtctcattcctagtggccag

SEQ ID NO: 10119 - RNA, 20 nt, synthetic construct
  source 1..20: mol_type = other RNA
caagtggtccccagcataga

SEQ ID NO: 10120 - RNA, 20 nt, synthetic construct
  source 1..20: mol_type = other RNA
cccaagtggtccccagcata

SEQ ID NO: 10121 - RNA, 20 nt, synthetic construct
  source 1..20: mol_type = other RNA
accaaagcttttggctctcc

SEQ ID NO: 10122 - RNA, 20 nt, synthetic construct
  source 1..20: mol_type = other RNA
attcatctccaccaaagctt

SEQ ID NO: 10123 - RNA, 20 nt, synthetic construct
  source 1..20: mol_type = other RNA
tctaagctttgcagatgaat

SEQ ID NO: 10124 - RNA, 20 nt, synthetic construct
  source 1..20: mol_type = other RNA
aagctttgcagatgaatcct

SEQ ID NO: 10125 - RNA, 20 nt, synthetic construct
  source 1..20: mol_type = other RNA
agagaaaagaacagcaacag

SEQ ID NO: 10126 - RNA, 20 nt, synthetic construct
  source 1..20: mol_type = other RNA
ggaggggctgaccatttcag

SEQ ID NO: 10127 - RNA, 20 nt, synthetic construct
  source 1..20: mol_type = other RNA
gaggacccacagtccccttt

SEQ ID NO: 10128 - RNA, 20 nt, synthetic construct
  source 1..20: mol_type = other RNA
gagcctgttgctgttctttt

SEQ ID NO: 10129 - RNA, 20 nt, synthetic construct
  source 1..20: mol_type = other RNA
tagtactttacactaataaa

SEQ ID NO: 10130 - RNA, 20 nt, synthetic construct
  source 1..20: mol_type = other RNA
tgttcccccgcccactacgg

SEQ ID NO: 10131 - RNA, 20 nt, synthetic construct
  source 1..20: mol_type = other RNA
aactctgtttttgaaaaatt

SEQ ID NO: 10132 - RNA, 20 nt, synthetic construct
  source 1..20: mol_type = other RNA
gtttttgaaaaatttatttt

SEQ ID NO: 10133 - RNA, 20 nt, synthetic construct
  source 1..20: mol_type = other RNA
tagaagctaagaactttgcc

SEQ ID NO: 10134 - RNA, 20 nt, synthetic construct
  source 1..20: mol_type = other RNA
tgtgtataaaatcttgttta

SEQ ID NO: 10135 - RNA, 20 nt, synthetic construct
  source 1..20: mol_type = other RNA
gctacctcttgtgtataaaa

SEQ ID NO: 10136 - RNA, 20 nt, synthetic construct
  source 1..20: mol_type = other RNA
gaaggtaactgcacacacct

SEQ ID NO: 10137 - RNA, 20 nt, synthetic construct
  source 1..20: mol_type = other RNA
atgttagcagggaaggtggg

SEQ ID NO: 10138 - RNA, 20 nt, synthetic construct
  source 1..20: mol_type = other RNA
agttcctaaaactgactgta

SEQ ID NO: 10139 - RNA, 20 nt, synthetic construct
  source 1..20: mol_type = other RNA
cacggtcactgacaactaca

SEQ ID NO: 10140 - RNA, 20 nt, synthetic construct
  source 1..20: mol_type = other RNA
aggagaagtcgtggtgagat

SEQ ID NO: 10141 - RNA, 20 nt, synthetic construct
  source 1..20: mol_type = other RNA
tggagtcctcacacggtcac

SEQ ID NO: 10142 - RNA, 20 nt, synthetic construct
  source 1..20: mol_type = other RNA
ccacgacttctcctggagtc

SEQ ID NO: 10143 - RNA, 20 nt, synthetic construct
  source 1..20: mol_type = other RNA
ctaagggagcttcttgagaa

SEQ ID NO: 10144 - RNA, 20 nt, synthetic construct
  source 1..20: mol_type = other RNA
cttagtgaggccgatcttaa

SEQ ID NO: 10145 - RNA, 20 nt, synthetic construct
  source 1..20: mol_type = other RNA
agaagctcccttagtgaggc

SEQ ID NO: 10146 - RNA, 20 nt, synthetic construct
  source 1..20: mol_type = other RNA
ataatgctgtgtgttctcaa

SEQ ID NO: 10147 - RNA, 20 nt, synthetic construct
  source 1..20: mol_type = other RNA
gtttgcagaccattttgaaa

SEQ ID NO: 10148 - RNA, 20 nt, synthetic construct
  source 1..20: mol_type = other RNA
tccaaggtaagcctgtcata

SEQ ID NO: 10149 - RNA, 20 nt, synthetic construct
  source 1..20: mol_type = other RNA
ctgtaaagcttcatcaggat

SEQ ID NO: 10150 - RNA, 20 nt, synthetic construct
  source 1..20: mol_type = other RNA
tgattttgggctcctgagag

SEQ ID NO: 10151 - RNA, 20 nt, synthetic construct
  source 1..20: mol_type = other RNA
tgagagtgcagtcgccagcg

SEQ ID NO: 10152 - RNA, 20 nt, synthetic construct
  source 1..20: mol_type = other RNA
ggagcccaaaatcaggagtg

SEQ ID NO: 10153 - RNA, 20 nt, synthetic construct
  source 1..20: mol_type = other RNA
caggagcccaaaatcaggag

SEQ ID NO: 10154 - RNA, 20 nt, synthetic construct
  source 1..20: mol_type = other RNA
tggtgaggatgtgggcggag

SEQ ID NO: 10155 - RNA, 20 nt, synthetic construct
  source 1..20: mol_type = other RNA
ccaagagattgtgtgggaca

SEQ ID NO: 10156 - RNA, 20 nt, synthetic construct
  source 1..20: mol_type = other RNA
gcccacatcctcaccaagag

SEQ ID NO: 10157 - RNA, 20 nt, synthetic construct
  source 1..20: mol_type = other RNA
ccgcccacatcctcaccaag

SEQ ID NO: 10158 - RNA, 20 nt, synthetic construct
  source 1..20: mol_type = other RNA
ccttctctccgcccacatcc

SEQ ID NO: 10159 - RNA, 20 nt, synthetic construct
  source 1..20: mol_type = other RNA
aaaccaatggtagaacatca

SEQ ID NO: 10160 - RNA, 20 nt, synthetic construct
  source 1..20: mol_type = other RNA
cctctgtccgtttctctaag

SEQ ID NO: 10161 - RNA, 20 nt, synthetic construct
  source 1..20: mol_type = other RNA
gtccgtttctctaagggtac

SEQ ID NO: 10162 - RNA, 20 nt, synthetic construct
  source 1..20: mol_type = other RNA
aagggtacagttctgctctt

SEQ ID NO: 10163 - RNA, 20 nt, synthetic construct
  source 1..20: mol_type = other RNA
taagtgctggcccttccatc

SEQ ID NO: 10164 - RNA, 20 nt, synthetic construct
  source 1..20: mol_type = other RNA
gtgtgtttgacaaaggccac

SEQ ID NO: 10165 - RNA, 20 nt, synthetic construct
  source 1..20: mol_type = other RNA
agcaagtcacagaataacaa

SEQ ID NO: 10166 - RNA, 20 nt, synthetic construct
  source 1..20: mol_type = other RNA
ctgccagagaatgaaaagac

SEQ ID NO: 10167 - RNA, 20 nt, synthetic construct
  source 1..20: mol_type = other RNA
ggcagtgagggtttctgtgc

SEQ ID NO: 10168 - RNA, 20 nt, synthetic construct
  source 1..20: mol_type = other RNA
ccatggcccagtcttttcat

SEQ ID NO: 10169 - RNA, 20 nt, synthetic construct
  source 1..20: mol_type = other RNA
cgccatggcccagtcttttc

SEQ ID NO: 10170 - RNA, 20 nt, synthetic construct
  source 1..20: mol_type = other RNA
ttactgtgctctcgccatgg

SEQ ID NO: 10171 - RNA, 20 nt, synthetic construct
  source 1..20: mol_type = other RNA
gtgacttggcaaatctgaca

SEQ ID NO: 10172 - RNA, 20 nt, synthetic construct
  source 1..20: mol_type = other RNA
ctagttctgtgcatggtgag

SEQ ID NO: 10173 - RNA, 20 nt, synthetic construct
  source 1..20: mol_type = other RNA
ccatgcacagaactagggag

SEQ ID NO: 10174 - RNA, 20 nt, synthetic construct
  source 1..20: mol_type = other RNA
cattttcggccctgttttgc

SEQ ID NO: 10175 - RNA, 20 nt, synthetic construct
  source 1..20: mol_type = other RNA
cccccacaccataaaaggga

SEQ ID NO: 10176 - RNA, 20 nt, synthetic construct
  source 1..20: mol_type = other RNA
cccacaccataaaagggagc

SEQ ID NO: 10177 - RNA, 20 nt, synthetic construct
  source 1..20: mol_type = other RNA
cttttatggtgtgggggaga

SEQ ID NO: 10178 - RNA, 20 nt, synthetic construct
  source 1..20: mol_type = other RNA
tttataccagctccctttta

SEQ ID NO: 10179 - RNA, 20 nt, synthetic construct
  source 1..20: mol_type = other RNA
acatgactaattaacactga

SEQ ID NO: 10180 - RNA, 20 nt, synthetic construct
  source 1..20: mol_type = other RNA
tcaacatgactaattaacac

SEQ ID NO: 10181 - RNA, 20 nt, synthetic construct
  source 1..20: mol_type = other RNA
aattccttctctgcattaca

SEQ ID NO: 10182 - RNA, 20 nt, synthetic construct
  source 1..20: mol_type = other RNA
gcattacaataactatgaaa

SEQ ID NO: 10183 - RNA, 20 nt, synthetic construct
  source 1..20: mol_type = other RNA
caagcagtgtgtaccaactc

SEQ ID NO: 10184 - RNA, 20 nt, synthetic construct
  source 1..20: mol_type = other RNA
aatagttaacttcatataca

SEQ ID NO: 10185 - RNA, 20 nt, synthetic construct
  source 1..20: mol_type = other RNA
aagcattaaaaagataattc

SEQ ID NO: 10186 - RNA, 20 nt, synthetic construct
  source 1..20: mol_type = other RNA
gtaaaattatatcttaaagt

SEQ ID NO: 10187 - RNA, 20 nt, synthetic construct
  source 1..20: mol_type = other RNA
taacttctttaagtaattga

SEQ ID NO: 10188 - RNA, 20 nt, synthetic construct
  source 1..20: mol_type = other RNA
agaagtacagggtgcattat

SEQ ID NO: 10189 - RNA, 20 nt, synthetic construct
  source 1..20: mol_type = other RNA
tttcaatctaattatatcag

SEQ ID NO: 10190 - RNA, 20 nt, synthetic construct
  source 1..20: mol_type = other RNA
tgaagatatttttctgatat

SEQ ID NO: 10191 - RNA, 20 nt, synthetic construct
  source 1..20: mol_type = other RNA
tctagacccatctgaaattc

SEQ ID NO: 10192 - RNA, 20 nt, synthetic construct
  source 1..20: mol_type = other RNA
ctatttgtatagaatttcag

SEQ ID NO: 10193 - RNA, 20 nt, synthetic construct
  source 1..20: mol_type = other RNA
acgatgctacaaaagaaatt

SEQ ID NO: 10194 - RNA, 20 nt, synthetic construct
  source 1..20: mol_type = other RNA
ctcttgtatgttcgtgtaac

SEQ ID NO: 10195 - RNA, 20 nt, synthetic construct
  source 1..20: mol_type = other RNA
tgtatgttcgtgtaacaaaa

SEQ ID NO: 10196 - RNA, 20 nt, synthetic construct
  source 1..20: mol_type = other RNA
atttccgaaaatctccacag

SEQ ID NO: 10197 - RNA, 20 nt, synthetic construct
  source 1..20: mol_type = other RNA
acagaaatgtgaatccacat

SEQ ID NO: 10198 - RNA, 20 nt, synthetic construct
  source 1..20: mol_type = other RNA
cgggacagctgatccacatg

SEQ ID NO: 10199 - RNA, 20 nt, synthetic construct
  source 1..20: mol_type = other RNA
ggcatgtggatcagctgtcc

SEQ ID NO: 10200 - RNA, 20 nt, synthetic construct
  source 1..20: mol_type = other RNA
cactgccaaacagctcccaa

SEQ ID NO: 10201 - RNA, 20 nt, synthetic construct
  source 1..20: mol_type = other RNA
caaaccttctagtggcttaa

SEQ ID NO: 10202 - RNA, 20 nt, synthetic construct
  source 1..20: mol_type = other RNA
aggaaagcatttttaagcca

SEQ ID NO: 10203 - RNA, 20 nt, synthetic construct
  source 1..20: mol_type = other RNA
aggctcttccaaagggttcg

SEQ ID NO: 10204 - RNA, 20 nt, synthetic construct
  source 1..20: mol_type = other RNA
tccaaagggttcgagattct

SEQ ID NO: 10205 - RNA, 20 nt, synthetic construct
  source 1..20: mol_type = other RNA
aaccctttggaagagcctgg

SEQ ID NO: 10206 - RNA, 20 nt, synthetic construct
  source 1..20: mol_type = other RNA
gcaccttcttggaatcagaa

SEQ ID NO: 10207 - RNA, 20 nt, synthetic construct
  source 1..20: mol_type = other RNA
tctcaggctgggcatgttcc

SEQ ID NO: 10208 - RNA, 20 nt, synthetic construct
  source 1..20: mol_type = other RNA
caggctgggcatgttcctct

SEQ ID NO: 10209 - RNA, 20 nt, synthetic construct
  source 1..20: mol_type = other RNA
ggctgggcatgttcctctag

SEQ ID NO: 10210 - RNA, 20 nt, synthetic construct
  source 1..20: mol_type = other RNA
agggatcaacatcatcaagg

SEQ ID NO: 10211 - RNA, 20 nt, synthetic construct
  source 1..20: mol_type = other RNA
actcaccaatcatcatggga

SEQ ID NO: 10212 - RNA, 20 nt, synthetic construct
  source 1..20: mol_type = other RNA
ccaatcatcatgggagattc

SEQ ID NO: 10213 - RNA, 20 nt, synthetic construct
  source 1..20: mol_type = other RNA
catgatgattggtgagttga

SEQ ID NO: 10214 - RNA, 20 nt, synthetic construct
  source 1..20: mol_type = other RNA
aaccgtatgaactttaactt

SEQ ID NO: 10215 - RNA, 20 nt, synthetic construct
  source 1..20: mol_type = other RNA
tttagtcagtgaaacaaccc

SEQ ID NO: 10216 - RNA, 20 nt, synthetic construct
  source 1..20: mol_type = other RNA
gcacccatgtgagaacgcag

SEQ ID NO: 10217 - RNA, 20 nt, synthetic construct
  source 1..20: mol_type = other RNA
catgggtgcagagtagcatt

SEQ ID NO: 10218 - RNA, 20 nt, synthetic construct
  source 1..20: mol_type = other RNA
gcgttctcacatgggtgcag

SEQ ID NO: 10219 - RNA, 20 nt, synthetic construct
  source 1..20: mol_type = other RNA
cagctttatcactgctctgc

SEQ ID NO: 10220 - RNA, 20 nt, synthetic construct
  source 1..20: mol_type = other RNA
cccagctttatcactgctct

SEQ ID NO: 10221 - RNA, 20 nt, synthetic construct
  source 1..20: mol_type = other RNA
cacagtgcccaacgtgaagc

SEQ ID NO: 10222 - RNA, 20 nt, synthetic construct
  source 1..20: mol_type = other RNA
ctgccctgcacctgccaaat

SEQ ID NO: 10223 - RNA, 20 nt, synthetic construct
  source 1..20: mol_type = other RNA
gggtcactcctgggtctgaa

SEQ ID NO: 10224 - RNA, 20 nt, synthetic construct
  source 1..20: mol_type = other RNA
tgggtctgaaggctacctct

SEQ ID NO: 10225 - RNA, 20 nt, synthetic construct
  source 1..20: mol_type = other RNA
gttaccatctgtgtggcctt

SEQ ID NO: 10226 - RNA, 20 nt, synthetic construct
  source 1..20: mol_type = other RNA
ccgtgtgccatggggctgat

SEQ ID NO: 10227 - RNA, 20 nt, synthetic construct
  source 1..20: mol_type = other RNA
aactagatcagccccatggc

SEQ ID NO: 10228 - RNA, 20 nt, synthetic construct
  source 1..20: mol_type = other RNA
ccaccccagctccaactaga

SEQ ID NO: 10229 - RNA, 20 nt, synthetic construct
  source 1..20: mol_type = other RNA
tccccaccccagctccaact

SEQ ID NO: 10230 - RNA, 20 nt, synthetic construct
  source 1..20: mol_type = other RNA
ctaaagtgacaacctaagct

SEQ ID NO: 10231 - RNA, 20 nt, synthetic construct
  source 1..20: mol_type = other RNA
aaagtgacaacctaagctga

SEQ ID NO: 10232 - RNA, 20 nt, synthetic construct
  source 1..20: mol_type = other RNA
gcttaggttgtcactttaga

SEQ ID NO: 10233 - RNA, 20 nt, synthetic construct
  source 1..20: mol_type = other RNA
ctcagcttaggttgtcactt

SEQ ID NO: 10234 - RNA, 20 nt, synthetic construct
  source 1..20: mol_type = other RNA
cactcagcttaggttgtcac

SEQ ID NO: 10235 - RNA, 20 nt, synthetic construct
  source 1..20: mol_type = other RNA
cccccaactctcactcagct

SEQ ID NO: 10236 - RNA, 20 nt, synthetic construct
  source 1..20: mol_type = other RNA
gggcccccctactcaccccc

SEQ ID NO: 10237 - RNA, 20 nt, synthetic construct
  source 1..20: mol_type = other RNA
tccttccacctcagggcccc

SEQ ID NO: 10238 - RNA, 20 nt, synthetic construct
  source 1..20: mol_type = other RNA
cttccttccacctcagggcc

SEQ ID NO: 10239 - RNA, 20 nt, synthetic construct
  source 1..20: mol_type = other RNA
caagtagctgggattacagg

SEQ ID NO: 10240 - RNA, 20 nt, synthetic construct
  source 1..20: mol_type = other RNA
gcctcccaagtagctgggat

SEQ ID NO: 10241 - RNA, 20 nt, synthetic construct
  source 1..20: mol_type = other RNA
ttgcctcagcctcccaagta

SEQ ID NO: 10242 - RNA, 20 nt, synthetic construct
  source 1..20: mol_type = other RNA
caggttccagcgattctcct

SEQ ID NO: 10243 - RNA, 20 nt, synthetic construct
  source 1..20: mol_type = other RNA
ttctcccaggttccagcgat

SEQ ID NO: 10244 - RNA, 20 nt, synthetic construct
  source 1..20: mol_type = other RNA
ctgctacctccttctcccag

SEQ ID NO: 10245 - RNA, 20 nt, synthetic construct
  source 1..20: mol_type = other RNA
cctcactgctacctccttct

SEQ ID NO: 10246 - RNA, 20 nt, synthetic construct
  source 1..20: mol_type = other RNA
agcctgggtgacagagcaac

SEQ ID NO: 10247 - RNA, 20 nt, synthetic construct
  source 1..20: mol_type = other RNA
gtcacccaggctggagtgca

SEQ ID NO: 10248 - RNA, 20 nt, synthetic construct
  source 1..20: mol_type = other RNA
atctcaaaaaaaaaaaaaaa

SEQ ID NO: 10249 - RNA, 20 nt, synthetic construct
  source 1..20: mol_type = other RNA
aaaaaaaaaaaaaaaaaaaa

SEQ ID NO: 10250 - RNA, 20 nt, synthetic construct
  source 1..20: mol_type = other RNA
ccacccccattttctgattt

SEQ ID NO: 10251 - RNA, 20 nt, synthetic construct
  source 1..20: mol_type = other RNA
acacagtcctgcttgatcta

SEQ ID NO: 10252 - RNA, 20 nt, synthetic construct
  source 1..20: mol_type = other RNA
tcatacaaagcctttgaaag

SEQ ID NO: 10253 - RNA, 20 nt, synthetic construct
  source 1..20: mol_type = other RNA
tacaaagcctttgaaaggtt

SEQ ID NO: 10254 - RNA, 20 nt, synthetic construct
  source 1..20: mol_type = other RNA
ggttcatgcactaaaacctt

SEQ ID NO: 10255 - RNA, 20 nt, synthetic construct
  source 1..20: mol_type = other RNA
ctggttcatgcactaaaacc

SEQ ID NO: 10256 - RNA, 20 nt, synthetic construct
  source 1..20: mol_type = other RNA
acccctgcttctctctggtt

SEQ ID NO: 10257 - RNA, 20 nt, synthetic construct
  source 1..20: mol_type = other RNA
cctccacccctgcttctctc

SEQ ID NO: 10258 - RNA, 20 nt, synthetic construct
  source 1..20: mol_type = other RNA
gcctacatctgtaaggatcc

SEQ ID NO: 10259 - RNA, 20 nt, synthetic construct
  source 1..20: mol_type = other RNA
ctgcctacatctgtaaggat

SEQ ID NO: 10260 - RNA, 20 nt, synthetic construct
  source 1..20: mol_type = other RNA
acctgtcatcagcccctctc

SEQ ID NO: 10261 - RNA, 20 nt, synthetic construct
  source 1..20: mol_type = other RNA
tccacctgtcatcagcccct

SEQ ID NO: 10262 - RNA, 20 nt, synthetic construct
  source 1..20: mol_type = other RNA
cctccacctgtcatcagccc

SEQ ID NO: 10263 - RNA, 20 nt, synthetic construct
  source 1..20: mol_type = other RNA
tccctctcctccacctgtca

SEQ ID NO: 10264 - RNA, 20 nt, synthetic construct
  source 1..20: mol_type = other RNA
ctttgaaagggtgctcgtcc

SEQ ID NO: 10265 - RNA, 20 nt, synthetic construct
  source 1..20: mol_type = other RNA
cacacagcacccccatgtca

SEQ ID NO: 10266 - RNA, 20 nt, synthetic construct
  source 1..20: mol_type = other RNA
gtcagtgttccttatctcac

SEQ ID NO: 10267 - RNA, 20 nt, synthetic construct
  source 1..20: mol_type = other RNA
ctgcgcccaccaaagctggc

SEQ ID NO: 10268 - RNA, 20 nt, synthetic construct
  source 1..20: mol_type = other RNA
tccctgcgcccaccaaagct

SEQ ID NO: 10269 - RNA, 20 nt, synthetic construct
  source 1..20: mol_type = other RNA
atgtgcccagcccctcctcc

SEQ ID NO: 10270 - RNA, 20 nt, synthetic construct
  source 1..20: mol_type = other RNA
gactcgatgtgcccagcccc

SEQ ID NO: 10271 - RNA, 20 nt, synthetic construct
  source 1..20: mol_type = other RNA
acttggcataccttaaagac

SEQ ID NO: 10272 - RNA, 20 nt, synthetic construct
  source 1..20: mol_type = other RNA
tgttcttgacgttctccact

SEQ ID NO: 10273 - RNA, 20 nt, synthetic construct
  source 1..20: mol_type = other RNA
cttgttcttgacgttctcca

SEQ ID NO: 10274 - RNA, 20 nt, synthetic construct
  source 1..20: mol_type = other RNA
gcacccaccttggatttctg

SEQ ID NO: 10275 - RNA, 20 nt, synthetic construct
  source 1..20: mol_type = other RNA
ccgcacccaccttggatttc

SEQ ID NO: 10276 - RNA, 20 nt, synthetic construct
  source 1..20: mol_type = other RNA
atattctctccgcacccacc

SEQ ID NO: 10277 - RNA, 20 nt, synthetic construct
  source 1..20: mol_type = other RNA
ctccatattctctccgcacc

SEQ ID NO: 10278 - RNA, 20 nt, synthetic construct
  source 1..20: mol_type = other RNA
tgccctcactccatattctc

SEQ ID NO: 10279 - RNA, 20 nt, synthetic construct
  source 1..20: mol_type = other RNA
aacctgtatcctcctgccct

SEQ ID NO: 10280 - RNA, 20 nt, synthetic construct
  source 1..20: mol_type = other RNA
acaaacctttactggtggtc

SEQ ID NO: 10281 - RNA, 20 nt, synthetic construct
  source 1..20: mol_type = other RNA
tctggaccaccagtaaaggt

SEQ ID NO: 10282 - RNA, 20 nt, synthetic construct
  source 1..20: mol_type = other RNA
ttcctagtactgcctcttct

SEQ ID NO: 10283 - RNA, 20 nt, synthetic construct
  source 1..20: mol_type = other RNA
gtctccttcctagtactgcc

SEQ ID NO: 10284 - RNA, 20 nt, synthetic construct
  source 1..20: mol_type = other RNA
aacccttctggctgttcctt

SEQ ID NO: 10285 - RNA, 20 nt, synthetic construct
  source 1..20: mol_type = other RNA
tagttttcctcaaacccttc

SEQ ID NO: 10286 - RNA, 20 nt, synthetic construct
  source 1..20: mol_type = other RNA
cgtagttttcctcaaaccct

SEQ ID NO: 10287 - RNA, 20 nt, synthetic construct
  source 1..20: mol_type = other RNA
ctcgtagttttcctcaaacc

SEQ ID NO: 10288 - RNA, 20 nt, synthetic construct
  source 1..20: mol_type = other RNA
tcccgtttgaaacactattc

SEQ ID NO: 10289 - RNA, 20 nt, synthetic construct
  source 1..20: mol_type = other RNA
tggcgctcttcccgtttgaa

SEQ ID NO: 10290 - RNA, 20 nt, synthetic construct
  source 1..20: mol_type = other RNA
gcagcatctagcgctcctgg

SEQ ID NO: 10291 - RNA, 20 nt, synthetic construct
  source 1..20: mol_type = other RNA
tcttagccgactgctcggca

SEQ ID NO: 10292 - RNA, 20 nt, synthetic construct
  source 1..20: mol_type = other RNA
gcagttggggtgacaggtgg

SEQ ID NO: 10293 - RNA, 20 nt, synthetic construct
  source 1..20: mol_type = other RNA
aactcagcagttggggtgac

SEQ ID NO: 10294 - RNA, 20 nt, synthetic construct
  source 1..20: mol_type = other RNA
ccaactcagcagttggggtg

SEQ ID NO: 10295 - RNA, 20 nt, synthetic construct
  source 1..20: mol_type = other RNA
tctctccaactcagcagttg

SEQ ID NO: 10296 - RNA, 20 nt, synthetic construct
  source 1..20: mol_type = other RNA
ctcttctctccaactcagca

SEQ ID NO: 10297 - RNA, 20 nt, synthetic construct
  source 1..20: mol_type = other RNA
tccctgctaactccctcttc

SEQ ID NO: 10298 - RNA, 20 nt, synthetic construct
  source 1..20: mol_type = other RNA
tcagcctcttccctgctaac

SEQ ID NO: 10299 - RNA, 20 nt, synthetic construct
  source 1..20: mol_type = other RNA
ctcttcagcctcttccctgc

SEQ ID NO: 10300 - RNA, 20 nt, synthetic construct
  source 1..20: mol_type = other RNA
ctcgctcttcagcctcttcc

SEQ ID NO: 10301 - RNA, 20 nt, synthetic construct
  source 1..20: mol_type = other RNA
cactcgctcttcagcctctt

SEQ ID NO: 10302 - RNA, 20 nt, synthetic construct
  source 1..20: mol_type = other RNA
aaacttaactttccccattt

SEQ ID NO: 10303 - RNA, 20 nt, synthetic construct
  source 1..20: mol_type = other RNA
tctttgcagccaaacttcga

SEQ ID NO: 10304 - RNA, 20 nt, synthetic construct
  source 1..20: mol_type = other RNA
ctgttgcccctgccttcttt

SEQ ID NO: 10305 - RNA, 20 nt, synthetic construct
  source 1..20: mol_type = other RNA
tctccctgttgcccctgcct

SEQ ID NO: 10306 - RNA, 20 nt, synthetic construct
  source 1..20: mol_type = other RNA
cttctccctgttgcccctgc

SEQ ID NO: 10307 - RNA, 20 nt, synthetic construct
  source 1..20: mol_type = other RNA
tctgccctgtcaaagcctct

SEQ ID NO: 10308 - RNA, 20 nt, synthetic construct
  source 1..20: mol_type = other RNA
cttctgccctgtcaaagcct

SEQ ID NO: 10309 - RNA, 20 nt, synthetic construct
  source 1..20: mol_type = other RNA
tctgccctgtcaaagcctct

SEQ ID NO: 10310 - RNA, 20 nt, synthetic construct
  source 1..20: mol_type = other RNA
gcacactggtttctcttctg

SEQ ID NO: 10311 - RNA, 20 nt, synthetic construct
  source 1..20: mol_type = other RNA
accctgccagacccttccca

SEQ ID NO: 10312 - RNA, 20 nt, synthetic construct
  source 1..20: mol_type = other RNA
tcaatatccagaacgctcca

SEQ ID NO: 10313 - RNA, 20 nt, synthetic construct
  source 1..20: mol_type = other RNA
gccaaggtgggcggggatga

SEQ ID NO: 10314 - RNA, 20 nt, synthetic construct
  source 1..20: mol_type = other RNA
tccccgcccaccttggcaga

SEQ ID NO: 10315 - RNA, 20 nt, synthetic construct
  source 1..20: mol_type = other RNA
gtccacccaaagcccctagc

SEQ ID NO: 10316 - RNA, 20 nt, synthetic construct
  source 1..20: mol_type = other RNA
tgtgacagtgggaagtttgc

SEQ ID NO: 10317 - RNA, 20 nt, synthetic construct
  source 1..20: mol_type = other RNA
cctgtgacagtgggaagttt

SEQ ID NO: 10318 - RNA, 20 nt, synthetic construct
  source 1..20: mol_type = other RNA
tctcctgtgacagtgggaag

SEQ ID NO: 10319 - RNA, 20 nt, synthetic construct
  source 1..20: mol_type = other RNA
tgcggccactaattcccaag

SEQ ID NO: 10320 - RNA, 20 nt, synthetic construct
  source 1..20: mol_type = other RNA
cctgtgacagcttttatttt

SEQ ID NO: 10321 - RNA, 20 nt, synthetic construct
  source 1..20: mol_type = other RNA
tgtgacagcttttattttct

SEQ ID NO: 10322 - RNA, 20 nt, synthetic construct
  source 1..20: mol_type = other RNA
gcaaatgaagtaggtgatga

SEQ ID NO: 10323 - RNA, 20 nt, synthetic construct
  source 1..20: mol_type = other RNA
tcacctacttcatttgcaga

SEQ ID NO: 10324 - RNA, 20 nt, synthetic construct
  source 1..20: mol_type = other RNA
acacattacctcatcaccta

SEQ ID NO: 10325 - RNA, 20 nt, synthetic construct
  source 1..20: mol_type = other RNA
catagtgcttatgaggatcc

SEQ ID NO: 10326 - RNA, 20 nt, synthetic construct
  source 1..20: mol_type = other RNA
taagcactatgtgaggcagc

SEQ ID NO: 10327 - RNA, 20 nt, synthetic construct
  source 1..20: mol_type = other RNA
gtggtcccttcacagtactt

SEQ ID NO: 10328 - RNA, 20 nt, synthetic construct
  source 1..20: mol_type = other RNA
tctgtggtcccttcacagta

SEQ ID NO: 10329 - RNA, 20 nt, synthetic construct
  source 1..20: mol_type = other RNA
cctggcaagcaggtatactt

SEQ ID NO: 10330 - RNA, 20 nt, synthetic construct
  source 1..20: mol_type = other RNA
tgaagtatacctgcttgcca

SEQ ID NO: 10331 - RNA, 20 nt, synthetic construct
  source 1..20: mol_type = other RNA
cgtgctcttgaagtatacct

SEQ ID NO: 10332 - RNA, 20 nt, synthetic construct
  source 1..20: mol_type = other RNA
tgaaagaaaagctcccgtgc

SEQ ID NO: 10333 - RNA, 20 nt, synthetic construct
  source 1..20: mol_type = other RNA
ccagccttcctggaaatgtg

SEQ ID NO: 10334 - RNA, 20 nt, synthetic construct
  source 1..20: mol_type = other RNA
caccagccttcctggaaatg

SEQ ID NO: 10335 - RNA, 20 nt, synthetic construct
  source 1..20: mol_type = other RNA
tttgctctcaccagccttcc

SEQ ID NO: 10336 - RNA, 20 nt, synthetic construct
  source 1..20: mol_type = other RNA
aggccttccattcacttcac

SEQ ID NO: 10337 - RNA, 20 nt, synthetic construct
  source 1..20: mol_type = other RNA
aggtgtttgtggctggccac

SEQ ID NO: 10338 - RNA, 20 nt, synthetic construct
  source 1..20: mol_type = other RNA
gccctgtaaacacacggtta

SEQ ID NO: 10339 - RNA, 20 nt, synthetic construct
  source 1..20: mol_type = other RNA
gcatatgcactaaccgtgtg

SEQ ID NO: 10340 - RNA, 20 nt, synthetic construct
  source 1..20: mol_type = other RNA
gctcagcatatgcactaacc

SEQ ID NO: 10341 - RNA, 20 nt, synthetic construct
  source 1..20: mol_type = other RNA
agtgatctcagctcagcata

SEQ ID NO: 10342 - RNA, 20 nt, synthetic construct
  source 1..20: mol_type = other RNA
ttggactcacattccagagg

SEQ ID NO: 10343 - RNA, 20 nt, synthetic construct
  source 1..20: mol_type = other RNA
cattccagaggaagcatctt

SEQ ID NO: 10344 - RNA, 20 nt, synthetic construct
  source 1..20: mol_type = other RNA
ggaatgtgagtccaaagagt

SEQ ID NO: 10345 - RNA, 20 nt, synthetic construct
  source 1..20: mol_type = other RNA
gctgtggaaattctttttgg

SEQ ID NO: 10346 - RNA, 20 nt, synthetic construct
  source 1..20: mol_type = other RNA
taagctttccaaaaagaatt

SEQ ID NO: 10347 - RNA, 20 nt, synthetic construct
  source 1..20: mol_type = other RNA
gttctcattggcaggactac

SEQ ID NO: 10348 - RNA, 20 nt, synthetic construct
  source 1..20: mol_type = other RNA
ttggcaggactactctccga

SEQ ID NO: 10349 - RNA, 20 nt, synthetic construct
  source 1..20: mol_type = other RNA
ccgacccattactgcttcct

SEQ ID NO: 10350 - RNA, 20 nt, synthetic construct
  source 1..20: mol_type = other RNA
gacccattactgcttcctga

SEQ ID NO: 10351 - RNA, 20 nt, synthetic construct
  source 1..20: mol_type = other RNA
ttttcattcaacaaagctgt

SEQ ID NO: 10352 - RNA, 20 nt, synthetic construct
  source 1..20: mol_type = other RNA
ggtcccactgaaggtcagat

SEQ ID NO: 10353 - RNA, 20 nt, synthetic construct
  source 1..20: mol_type = other RNA
ggcctccggtcccactgaag

SEQ ID NO: 10354 - RNA, 20 nt, synthetic construct
  source 1..20: mol_type = other RNA
caggcctccggtcccactga

SEQ ID NO: 10355 - RNA, 20 nt, synthetic construct
  source 1..20: mol_type = other RNA
ctctcaggcctccggtccca

SEQ ID NO: 10356 - RNA, 20 nt, synthetic construct
  source 1..20: mol_type = other RNA
acccctgtccctttttgtga

SEQ ID NO: 10357 - RNA, 20 nt, synthetic construct
  source 1..20: mol_type = other RNA
tcttcaactcatacctctct

SEQ ID NO: 10358 - RNA, 20 nt, synthetic construct
  source 1..20: mol_type = other RNA
tacctctcttctcagaggtt

SEQ ID NO: 10359 - RNA, 20 nt, synthetic construct
  source 1..20: mol_type = other RNA
cttctcagaggttgcagttt

SEQ ID NO: 10360 - RNA, 20 nt, synthetic construct
  source 1..20: mol_type = other RNA
tctcagaggttgcagtttct

SEQ ID NO: 10361 - RNA, 20 nt, synthetic construct
  source 1..20: mol_type = other RNA
gaggttgcagtttctgagaa

SEQ ID NO: 10362 - RNA, 20 nt, synthetic construct
  source 1..20: mol_type = other RNA
gagaagagaggtatgagttg

SEQ ID NO: 10363 - RNA, 20 nt, synthetic construct
  source 1..20: mol_type = other RNA
gaaactgcaacctctgagaa

SEQ ID NO: 10364 - RNA, 20 nt, synthetic construct
  source 1..20: mol_type = other RNA
ataagtgatttagaccacgc

SEQ ID NO: 10365 - RNA, 20 nt, synthetic construct
  source 1..20: mol_type = other RNA
tgtttttgcgtggtctaaat

SEQ ID NO: 10366 - RNA, 20 nt, synthetic construct
  source 1..20: mol_type = other RNA
cacctgagctgaaatggttc

SEQ ID NO: 10367 - RNA, 20 nt, synthetic construct
  source 1..20: mol_type = other RNA
cctgagctgaaatggttcgc

SEQ ID NO: 10368 - RNA, 20 nt, synthetic construct
  source 1..20: mol_type = other RNA
ggtgagagttgtctcttgtt

SEQ ID NO: 10369 - RNA, 20 nt, synthetic construct
  source 1..20: mol_type = other RNA
aatgaaacatcaactggaaa

SEQ ID NO: 10370 - RNA, 20 nt, synthetic construct
  source 1..20: mol_type = other RNA
gtggtgtccagtaatgttct

SEQ ID NO: 10371 - RNA, 20 nt, synthetic construct
  source 1..20: mol_type = other RNA
gatgtcagaacattactgga

SEQ ID NO: 10372 - RNA, 20 nt, synthetic construct
  source 1..20: mol_type = other RNA
gatggcatttttgacctttc

SEQ ID NO: 10373 - RNA, 20 nt, synthetic construct
  source 1..20: mol_type = other RNA
atatctaatggtagaaactg

SEQ ID NO: 10374 - RNA, 20 nt, synthetic construct
  source 1..20: mol_type = other RNA
gtcaagtattgcttcttata

SEQ ID NO: 10375 - RNA, 20 nt, synthetic construct
  source 1..20: mol_type = other RNA
atattcagttctagagattt

SEQ ID NO: 10376 - RNA, 20 nt, synthetic construct
  source 1..20: mol_type = other RNA
agaactgaatatggagactg

SEQ ID NO: 10377 - RNA, 20 nt, synthetic construct
  source 1..20: mol_type = other RNA
agtggtgggaattctccttg

SEQ ID NO: 10378 - RNA, 20 nt, synthetic construct
  source 1..20: mol_type = other RNA
ttgaagtactccttagctgc

SEQ ID NO: 10379 - RNA, 20 nt, synthetic construct
  source 1..20: mol_type = other RNA
ttagctgcaggacacctgat

SEQ ID NO: 10380 - RNA, 20 nt, synthetic construct
  source 1..20: mol_type = other RNA
gtcatcaggtgtcctgcagc

SEQ ID NO: 10381 - RNA, 20 nt, synthetic construct
  source 1..20: mol_type = other RNA
tcggtcatcaggtgtcctgc

SEQ ID NO: 10382 - RNA, 20 nt, synthetic construct
  source 1..20: mol_type = other RNA
aggaaccccatttaagtaga

SEQ ID NO: 10383 - RNA, 20 nt, synthetic construct
  source 1..20: mol_type = other RNA
atgaatttgactactctagg

SEQ ID NO: 10384 - RNA, 20 nt, synthetic construct
  source 1..20: mol_type = other RNA
cttcccccagcccctggggg

SEQ ID NO: 10385 - RNA, 20 nt, synthetic construct
  source 1..20: mol_type = other RNA
ctattcctcccttcccccag

SEQ ID NO: 10386 - RNA, 20 nt, synthetic construct
  source 1..20: mol_type = other RNA
ggacctattgaagactgact

SEQ ID NO: 10387 - RNA, 20 nt, synthetic construct
  source 1..20: mol_type = other RNA
tttcatcttctgaaactgaa

SEQ ID NO: 10388 - RNA, 20 nt, synthetic construct
  source 1..20: mol_type = other RNA
agaactcttttcatcttctg

SEQ ID NO: 10389 - RNA, 20 nt, synthetic construct
  source 1..20: mol_type = other RNA
atgactctaggcatgtcact

SEQ ID NO: 10390 - RNA, 20 nt, synthetic construct
  source 1..20: mol_type = other RNA
aggcatgtcacttaaactac

SEQ ID NO: 10391 - RNA, 20 nt, synthetic construct
  source 1..20: mol_type = other RNA
caactgtactaacctcatga

SEQ ID NO: 10392 - RNA, 20 nt, synthetic construct
  source 1..20: mol_type = other RNA
tgaagttgttacaaagatga

SEQ ID NO: 10393 - RNA, 20 nt, synthetic construct
  source 1..20: mol_type = other RNA
ggagctacaggtgacatgat

SEQ ID NO: 10394 - RNA, 20 nt, synthetic construct
  source 1..20: mol_type = other RNA
tgagcacttgtgaacccagg

SEQ ID NO: 10395 - RNA, 20 nt, synthetic construct
  source 1..20: mol_type = other RNA
gaatagcctttcaaatcatg

SEQ ID NO: 10396 - RNA, 20 nt, synthetic construct
  source 1..20: mol_type = other RNA
aggtccctaacctcagaata

SEQ ID NO: 10397 - RNA, 20 nt, synthetic construct
  source 1..20: mol_type = other RNA
tcaggctctaggtccctaac

SEQ ID NO: 10398 - RNA, 20 nt, synthetic construct
  source 1..20: mol_type = other RNA
ttaatgtaacccagctacca

SEQ ID NO: 10399 - RNA, 20 nt, synthetic construct
  source 1..20: mol_type = other RNA
aggtttctcattaatgtaac

SEQ ID NO: 10400 - RNA, 20 nt, synthetic construct
  source 1..20: mol_type = other RNA
tgaactcttgctcttaaagc

SEQ ID NO: 10401 - RNA, 20 nt, synthetic construct
  source 1..20: mol_type = other RNA
tgctcttaaagcctccatat

SEQ ID NO: 10402 - RNA, 20 nt, synthetic construct
  source 1..20: mol_type = other RNA
taaagcctccatatctgccc

SEQ ID NO: 10403 - RNA, 20 nt, synthetic construct
  source 1..20: mol_type = other RNA
atatctgccctgattcctgc

SEQ ID NO: 10404 - RNA, 20 nt, synthetic construct
  source 1..20: mol_type = other RNA
cccatcaggccttatgtcag

SEQ ID NO: 10405 - RNA, 20 nt, synthetic construct
  source 1..20: mol_type = other RNA
tttaatacttcccctcatat

SEQ ID NO: 10406 - RNA, 20 nt, synthetic construct
  source 1..20: mol_type = other RNA
tatttttttgagatcatgca

SEQ ID NO: 10407 - RNA, 20 nt, synthetic construct
  source 1..20: mol_type = other RNA
aaaaaatatgaggggaagta

SEQ ID NO: 10408 - RNA, 20 nt, synthetic construct
  source 1..20: mol_type = other RNA
gtcagggcctgcttgcttgg

SEQ ID NO: 10409 - RNA, 20 nt, synthetic construct
  source 1..20: mol_type = other RNA
aggtatcaaaaccgggcaca

SEQ ID NO: 10410 - RNA, 20 nt, synthetic construct
  source 1..20: mol_type = other RNA
tatgtgacttgtaattaaaa

SEQ ID NO: 10411 - RNA, 20 nt, synthetic construct
  source 1..20: mol_type = other RNA
ctgcattttaattcaatact

SEQ ID NO: 10412 - RNA, 20 nt, synthetic construct
  source 1..20: mol_type = other RNA
aaagtaagtattgaattaaa

SEQ ID NO: 10413 - RNA, 20 nt, synthetic construct
  source 1..20: mol_type = other RNA
tgctcaaaagtaagtattga

SEQ ID NO: 10414 - RNA, 20 nt, synthetic construct
  source 1..20: mol_type = other RNA
gctttgatgcaccacagtaa

SEQ ID NO: 10415 - RNA, 20 nt, synthetic construct
  source 1..20: mol_type = other RNA
tccctcagctttgatgcacc

SEQ ID NO: 10416 - RNA, 20 nt, synthetic construct
  source 1..20: mol_type = other RNA
actgaaaatggctccaagtg

SEQ ID NO: 10417 - RNA, 20 nt, synthetic construct
  source 1..20: mol_type = other RNA
aagtgacaacaagctctctt

SEQ ID NO: 10418 - RNA, 20 nt, synthetic construct
  source 1..20: mol_type = other RNA
cttgttctaaaaatcgacaa

SEQ ID NO: 10419 - RNA, 20 nt, synthetic construct
  source 1..20: mol_type = other RNA
tgttctaaaaatcgacaaac

SEQ ID NO: 10420 - RNA, 20 nt, synthetic construct
  source 1..20: mol_type = other RNA
acagaatccctaaattctaa

SEQ ID NO: 10421 - RNA, 20 nt, synthetic construct
  source 1..20: mol_type = other RNA
taaaagtcaaacttgcagca

SEQ ID NO: 10422 - RNA, 20 nt, synthetic construct
  source 1..20: mol_type = other RNA
aggtgaataatcaggcagta

SEQ ID NO: 10423 - RNA, 20 nt, synthetic construct
  source 1..20: mol_type = other RNA
gtaatatgatatgtggaaaa

SEQ ID NO: 10424 - RNA, 20 nt, synthetic construct
  source 1..20: mol_type = other RNA
cagtaatatgatatgtggaa

SEQ ID NO: 10425 - RNA, 20 nt, synthetic construct
  source 1..20: mol_type = other RNA
atgttttagggatttaaaca

SEQ ID NO: 10426 - RNA, 20 nt, synthetic construct
  source 1..20: mol_type = other RNA
cgcctgtaatccctgcactt

SEQ ID NO: 10427 - RNA, 20 nt, synthetic construct
  source 1..20: mol_type = other RNA
caaagtgcagggattacagg

SEQ ID NO: 10428 - RNA, 20 nt, synthetic construct
  source 1..20: mol_type = other RNA
agtgatccacccgcctttgc

SEQ ID NO: 10429 - RNA, 20 nt, synthetic construct
  source 1..20: mol_type = other RNA
tgacctcaagtgatccaccc

SEQ ID NO: 10430 - RNA, 20 nt, synthetic construct
  source 1..20: mol_type = other RNA
aactcctgacctcaagtgat

SEQ ID NO: 10431 - RNA, 20 nt, synthetic construct
  source 1..20: mol_type = other RNA
ggctggtctcaaactcctga

SEQ ID NO: 10432 - RNA, 20 nt, synthetic construct
  source 1..20: mol_type = other RNA
acaaaaaaatacaaaaatta

SEQ ID NO: 10433 - RNA, 20 nt, synthetic construct
  source 1..20: mol_type = other RNA
caagtaggtgggattatggg

SEQ ID NO: 10434 - RNA, 20 nt, synthetic construct
  source 1..20: mol_type = other RNA
gcctcccaagtaggtgggat

SEQ ID NO: 10435 - RNA, 20 nt, synthetic construct
  source 1..20: mol_type = other RNA
cacctcagcctcccaagtag

SEQ ID NO: 10436 - RNA, 20 nt, synthetic construct
  source 1..20: mol_type = other RNA
agtgatcctcccacctcagc

SEQ ID NO: 10437 - RNA, 20 nt, synthetic construct
  source 1..20: mol_type = other RNA
gccccacaagctcaagtgat

SEQ ID NO: 10438 - RNA, 20 nt, synthetic construct
  source 1..20: mol_type = other RNA
ctgcaaactctgccccacaa

SEQ ID NO: 10439 - RNA, 20 nt, synthetic construct
  source 1..20: mol_type = other RNA
gctcactgcaaactctgccc

SEQ ID NO: 10440 - RNA, 20 nt, synthetic construct
  source 1..20: mol_type = other RNA
agactggaagacaaagtgag

SEQ ID NO: 10441 - RNA, 20 nt, synthetic construct
  source 1..20: mol_type = other RNA
ctttgtcttccagtctagag

SEQ ID NO: 10442 - RNA, 20 nt, synthetic construct
  source 1..20: mol_type = other RNA
aaaataaataaataaataaa

SEQ ID NO: 10443 - RNA, 20 nt, synthetic construct
  source 1..20: mol_type = other RNA
tgaggagtttatagttttta

SEQ ID NO: 10444 - RNA, 20 nt, synthetic construct
  source 1..20: mol_type = other RNA
agagcaggaccaagtattat

SEQ ID NO: 10445 - RNA, 20 nt, synthetic construct
  source 1..20: mol_type = other RNA
tcaagagcaggaccaagtat

SEQ ID NO: 10446 - RNA, 20 nt, synthetic construct
  source 1..20: mol_type = other RNA
gactagagtacagcgttcca

SEQ ID NO: 10447 - RNA, 20 nt, synthetic construct
  source 1..20: mol_type = other RNA
agtcagagccacacacaggc

SEQ ID NO: 10448 - RNA, 20 nt, synthetic construct
  source 1..20: mol_type = other RNA
taatacatagcaaaatctaa

SEQ ID NO: 10449 - RNA, 20 nt, synthetic construct
  source 1..20: mol_type = other RNA
ggaaagccaatttagccttc

SEQ ID NO: 10450 - RNA, 20 nt, synthetic construct
  source 1..20: mol_type = other RNA
taagttgtttgggcagggct

SEQ ID NO: 10451 - RNA, 20 nt, synthetic construct
  source 1..20: mol_type = other RNA
tgaaatgtgaatgtcttttt

SEQ ID NO: 10452 - RNA, 20 nt, synthetic construct
  source 1..20: mol_type = other RNA
ggttttggtttttctctccc

SEQ ID NO: 10453 - RNA, 20 nt, synthetic construct
  source 1..20: mol_type = other RNA
ccccagtggctacagagtag

SEQ ID NO: 10454 - RNA, 20 nt, synthetic construct
  source 1..20: mol_type = other RNA
ccagtggctacagagtagaa

SEQ ID NO: 10455 - RNA, 20 nt, synthetic construct
  source 1..20: mol_type = other RNA
gtagccactggggagagaaa

SEQ ID NO: 10456 - RNA, 20 nt, synthetic construct
  source 1..20: mol_type = other RNA
ctgatgcaagaaatttttca

SEQ ID NO: 10457 - RNA, 20 nt, synthetic construct
  source 1..20: mol_type = other RNA
cagcacccctgaatcttgcc

SEQ ID NO: 10458 - RNA, 20 nt, synthetic construct
  source 1..20: mol_type = other RNA
tttagtcaggaaggtgtagc

SEQ ID NO: 10459 - RNA, 20 nt, synthetic construct
  source 1..20: mol_type = other RNA
tcttttagtcaggaaggtgt

SEQ ID NO: 10460 - RNA, 20 nt, synthetic construct
  source 1..20: mol_type = other RNA
ccctacacatttctcctctt

SEQ ID NO: 10461 - RNA, 20 nt, synthetic construct
  source 1..20: mol_type = other RNA
ttctggtcagaaaaattaaa

SEQ ID NO: 10462 - RNA, 20 nt, synthetic construct
  source 1..20: mol_type = other RNA
ctcattctggtcagaaaaat

SEQ ID NO: 10463 - RNA, 20 nt, synthetic construct
  source 1..20: mol_type = other RNA
gtgggatctacagtgactga

SEQ ID NO: 10464 - RNA, 20 nt, synthetic construct
  source 1..20: mol_type = other RNA
cggtgggatctacagtgact

SEQ ID NO: 10465 - RNA, 20 nt, synthetic construct
  source 1..20: mol_type = other RNA
tgctactctcggtgggatct

SEQ ID NO: 10466 - RNA, 20 nt, synthetic construct
  source 1..20: mol_type = other RNA
aacacaaatttgactcgctc

SEQ ID NO: 10467 - RNA, 20 nt, synthetic construct
  source 1..20: mol_type = other RNA
ctctacttgtataggatctt

SEQ ID NO: 10468 - RNA, 20 nt, synthetic construct
  source 1..20: mol_type = other RNA
acttgtataggatcttcaat

SEQ ID NO: 10469 - RNA, 20 nt, synthetic construct
  source 1..20: mol_type = other RNA
tgggtagaattataaagaaa

SEQ ID NO: 10470 - RNA, 20 nt, synthetic construct
  source 1..20: mol_type = other RNA
tgcctgttatctcagcactt

SEQ ID NO: 10471 - RNA, 20 nt, synthetic construct
  source 1..20: mol_type = other RNA
gcactttgcaaggccaaggc

SEQ ID NO: 10472 - RNA, 20 nt, synthetic construct
  source 1..20: mol_type = other RNA
tgccttggccttgcaaagtg

SEQ ID NO: 10473 - RNA, 20 nt, synthetic construct
  source 1..20: mol_type = other RNA
agtgatcctcctgccttggc

SEQ ID NO: 10474 - RNA, 20 nt, synthetic construct
  source 1..20: mol_type = other RNA
tggcctcaagtgatcctcct

SEQ ID NO: 10475 - RNA, 20 nt, synthetic construct
  source 1..20: mol_type = other RNA
aaaaaataaaaaaagaaatt

SEQ ID NO: 10476 - RNA, 20 nt, synthetic construct
  source 1..20: mol_type = other RNA
tgtatagctgggactacagg

SEQ ID NO: 10477 - RNA, 20 nt, synthetic construct
  source 1..20: mol_type = other RNA
gcctcctgtatagctgggac

SEQ ID NO: 10478 - RNA, 20 nt, synthetic construct
  source 1..20: mol_type = other RNA
aagtcctaggcacaaatgat

SEQ ID NO: 10479 - RNA, 20 nt, synthetic construct
  source 1..20: mol_type = other RNA
ctgtagcctcaaagtcctag

SEQ ID NO: 10480 - RNA, 20 nt, synthetic construct
  source 1..20: mol_type = other RNA
agcctgggcaacagagggag

SEQ ID NO: 10481 - RNA, 20 nt, synthetic construct
  source 1..20: mol_type = other RNA
gttgcccaggctggagccac

SEQ ID NO: 10482 - RNA, 20 nt, synthetic construct
  source 1..20: mol_type = other RNA
ctctgttgcccaggctggag

SEQ ID NO: 10483 - RNA, 20 nt, synthetic construct
  source 1..20: mol_type = other RNA
gtcttgaaaaaaagaaaaca

SEQ ID NO: 10484 - RNA, 20 nt, synthetic construct
  source 1..20: mol_type = other RNA
aatatatcttaaaactaaga

SEQ ID NO: 10485 - RNA, 20 nt, synthetic construct
  source 1..20: mol_type = other RNA
tagttttaagatatatttga

SEQ ID NO: 10486 - RNA, 20 nt, synthetic construct
  source 1..20: mol_type = other RNA
gtgggttatgaggacatata

SEQ ID NO: 10487 - RNA, 20 nt, synthetic construct
  source 1..20: mol_type = other RNA
taacccacagagaactatag

SEQ ID NO: 10488 - RNA, 20 nt, synthetic construct
  source 1..20: mol_type = other RNA
tatccttaggatcataaagt

SEQ ID NO: 10489 - RNA, 20 nt, synthetic construct
  source 1..20: mol_type = other RNA
aacttgcttagtaaaaatgt

SEQ ID NO: 10490 - RNA, 20 nt, synthetic construct
  source 1..20: mol_type = other RNA
ttagggataggactgtgtat

SEQ ID NO: 10491 - RNA, 20 nt, synthetic construct
  source 1..20: mol_type = other RNA
aaactctttattaaatgatt

SEQ ID NO: 10492 - RNA, 20 nt, synthetic construct
  source 1..20: mol_type = other RNA
ttattaaatgattattctgt

SEQ ID NO: 10493 - RNA, 20 nt, synthetic construct
  source 1..20: mol_type = other RNA
atggagtatcaagaattcga

SEQ ID NO: 10494 - RNA, 20 nt, synthetic construct
  source 1..20: mol_type = other RNA
atagaggccttggcacagaa

SEQ ID NO: 10495 - RNA, 20 nt, synthetic construct
  source 1..20: mol_type = other RNA
ctctctaaggaacctctgaa

SEQ ID NO: 10496 - RNA, 20 nt, synthetic construct
  source 1..20: mol_type = other RNA
ctaaggaacctctgaaccac

SEQ ID NO: 10497 - RNA, 20 nt, synthetic construct
  source 1..20: mol_type = other RNA
aaggaacctctgaaccacac

SEQ ID NO: 10498 - RNA, 20 nt, synthetic construct
  source 1..20: mol_type = other RNA
gaaccacactcattaactca

SEQ ID NO: 10499 - RNA, 20 nt, synthetic construct
  source 1..20: mol_type = other RNA
ttaactcataaccagtcacc

SEQ ID NO: 10500 - RNA, 20 nt, synthetic construct
  source 1..20: mol_type = other RNA
taaccagtcaccaaattcca

SEQ ID NO: 10501 - RNA, 20 nt, synthetic construct
  source 1..20: mol_type = other RNA
ttccacaatacctcttgatc

SEQ ID NO: 10502 - RNA, 20 nt, synthetic construct
  source 1..20: mol_type = other RNA
tgatctgtctgtcccttgcc

SEQ ID NO: 10503 - RNA, 20 nt, synthetic construct
  source 1..20: mol_type = other RNA
gaatattcccagactcctaa

SEQ ID NO: 10504 - RNA, 20 nt, synthetic construct
  source 1..20: mol_type = other RNA
taaatggtcttctagttccc

SEQ ID NO: 10505 - RNA, 20 nt, synthetic construct
  source 1..20: mol_type = other RNA
atccttcaatacaactgcca

SEQ ID NO: 10506 - RNA, 20 nt, synthetic construct
  source 1..20: mol_type = other RNA
ggcagttgtattgaaggatg

SEQ ID NO: 10507 - RNA, 20 nt, synthetic construct
  source 1..20: mol_type = other RNA
tcacacttctgagagtggaa

SEQ ID NO: 10508 - RNA, 20 nt, synthetic construct
  source 1..20: mol_type = other RNA
gaagtgtgaagagcagggga

SEQ ID NO: 10509 - RNA, 20 nt, synthetic construct
  source 1..20: mol_type = other RNA
cagaagtgtgaagagcaggg

SEQ ID NO: 10510 - RNA, 20 nt, synthetic construct
  source 1..20: mol_type = other RNA
taaaaatatttttcatagta

SEQ ID NO: 10511 - RNA, 20 nt, synthetic construct
  source 1..20: mol_type = other RNA
gagggtgactgtgaagttta

SEQ ID NO: 10512 - RNA, 20 nt, synthetic construct
  source 1..20: mol_type = other RNA
gaggtacatttctggcttta

SEQ ID NO: 10513 - RNA, 20 nt, synthetic construct
  source 1..20: mol_type = other RNA
actgtaggccctggcagggg

SEQ ID NO: 10514 - RNA, 20 nt, synthetic construct
  source 1..20: mol_type = other RNA
ccttcagtcccctgcactac

SEQ ID NO: 10515 - RNA, 20 nt, synthetic construct
  source 1..20: mol_type = other RNA
ctcactcaactgtgagctcc

SEQ ID NO: 10516 - RNA, 20 nt, synthetic construct
  source 1..20: mol_type = other RNA
ctcaactgtgagctcctagg

SEQ ID NO: 10517 - RNA, 20 nt, synthetic construct
  source 1..20: mol_type = other RNA
actgtgagctcctaggaggt

SEQ ID NO: 10518 - RNA, 20 nt, synthetic construct
  source 1..20: mol_type = other RNA
cagttgagtgagggagcaag

SEQ ID NO: 10519 - RNA, 20 nt, synthetic construct
  source 1..20: mol_type = other RNA
taggaggtagttttattact

SEQ ID NO: 10520 - RNA, 20 nt, synthetic construct
  source 1..20: mol_type = other RNA
taggagctcacagttgagtg

SEQ ID NO: 10521 - RNA, 20 nt, synthetic construct
  source 1..20: mol_type = other RNA
cctctaaaccaaatgcatta

SEQ ID NO: 10522 - RNA, 20 nt, synthetic construct
  source 1..20: mol_type = other RNA
aaaccaaatgcattagacac

SEQ ID NO: 10523 - RNA, 20 nt, synthetic construct
  source 1..20: mol_type = other RNA
ataaatgcagaccaaatgaa

SEQ ID NO: 10524 - RNA, 20 nt, synthetic construct
  source 1..20: mol_type = other RNA
attcatttggtctgcattta

SEQ ID NO: 10525 - RNA, 20 nt, synthetic construct
  source 1..20: mol_type = other RNA
cttttatttaggaatgtatt

SEQ ID NO: 10526 - RNA, 20 nt, synthetic construct
  source 1..20: mol_type = other RNA
tgaggtggagccgtttctag

SEQ ID NO: 10527 - RNA, 20 nt, synthetic construct
  source 1..20: mol_type = other RNA
tgagttaaagaatacgttcc

SEQ ID NO: 10528 - RNA, 20 nt, synthetic construct
  source 1..20: mol_type = other RNA
acctcatgagttaaagaata

SEQ ID NO: 10529 - RNA, 20 nt, synthetic construct
  source 1..20: mol_type = other RNA
atcaccttctggccgaccct

SEQ ID NO: 10530 - RNA, 20 nt, synthetic construct
  source 1..20: mol_type = other RNA
aatgctaagtctgggaactg

SEQ ID NO: 10531 - RNA, 20 nt, synthetic construct
  source 1..20: mol_type = other RNA
aaggttcttccagctgcaac

SEQ ID NO: 10532 - RNA, 20 nt, synthetic construct
  source 1..20: mol_type = other RNA
gatactttactatgaaatta

SEQ ID NO: 10533 - RNA, 20 nt, synthetic construct
  source 1..20: mol_type = other RNA
ttcctaatttcatagtaaag

SEQ ID NO: 10534 - RNA, 20 nt, synthetic construct
  source 1..20: mol_type = other RNA
ttcttttcttttctccttcc

SEQ ID NO: 10535 - RNA, 20 nt, synthetic construct
  source 1..20: mol_type = other RNA
cctactctttcttttctttt

SEQ ID NO: 10536 - RNA, 20 nt, synthetic construct
  source 1..20: mol_type = other RNA
accagcatcttctggaaaac

SEQ ID NO: 10537 - RNA, 20 nt, synthetic construct
  source 1..20: mol_type = other RNA
gagttaaggatgctatgaac

SEQ ID NO: 10538 - RNA, 20 nt, synthetic construct
  source 1..20: mol_type = other RNA
gagtattcccatttgtattc

SEQ ID NO: 10539 - RNA, 20 nt, synthetic construct
  source 1..20: mol_type = other RNA
ttcagccattttaataaaat

SEQ ID NO: 10540 - RNA, 20 nt, synthetic construct
  source 1..20: mol_type = other RNA
tggaagtgtggtattttaac

SEQ ID NO: 10541 - RNA, 20 nt, synthetic construct
  source 1..20: mol_type = other RNA
cttagtactgtacctggcct

SEQ ID NO: 10542 - RNA, 20 nt, synthetic construct
  source 1..20: mol_type = other RNA
ctgaatcctcacaacctgtg

SEQ ID NO: 10543 - RNA, 20 nt, synthetic construct
  source 1..20: mol_type = other RNA
caacctgtgaagtcagtcat

SEQ ID NO: 10544 - RNA, 20 nt, synthetic construct
  source 1..20: mol_type = other RNA
atgactgacttcacaggttg

SEQ ID NO: 10545 - RNA, 20 nt, synthetic construct
  source 1..20: mol_type = other RNA
ttgctatttactaattatat

SEQ ID NO: 10546 - RNA, 20 nt, synthetic construct
  source 1..20: mol_type = other RNA
ctttgctatttactaattat

SEQ ID NO: 10547 - RNA, 20 nt, synthetic construct
  source 1..20: mol_type = other RNA
tctgatataggtctgtagag

SEQ ID NO: 10548 - RNA, 20 nt, synthetic construct
  source 1..20: mol_type = other RNA
gatataggtctgtagagaaa

SEQ ID NO: 10549 - RNA, 20 nt, synthetic construct
  source 1..20: mol_type = other RNA
acagacctatatcagaggag

SEQ ID NO: 10550 - RNA, 20 nt, synthetic construct
  source 1..20: mol_type = other RNA
gccttttctctacagaccta

SEQ ID NO: 10551 - RNA, 20 nt, synthetic construct
  source 1..20: mol_type = other RNA
tattataatatgttttgccc

SEQ ID NO: 10552 - RNA, 20 nt, synthetic construct
  source 1..20: mol_type = other RNA
ttatatgaatttccactatg

SEQ ID NO: 10553 - RNA, 20 nt, synthetic construct
  source 1..20: mol_type = other RNA
cgctaccccagggaccaaca

SEQ ID NO: 10554 - RNA, 20 nt, synthetic construct
  source 1..20: mol_type = other RNA
ggtctcatttcttatttatt

SEQ ID NO: 10555 - RNA, 20 nt, synthetic construct
  source 1..20: mol_type = other RNA
tttcttatttatttatttat

SEQ ID NO: 10556 - RNA, 20 nt, synthetic construct
  source 1..20: mol_type = other RNA
tttctatgcttaaatttttc

SEQ ID NO: 10557 - RNA, 20 nt, synthetic construct
  source 1..20: mol_type = other RNA
ttgggaaaaatttaagcata

SEQ ID NO: 10558 - RNA, 20 nt, synthetic construct
  source 1..20: mol_type = other RNA
ctttgggaaaaatttaagca

SEQ ID NO: 10559 - RNA, 20 nt, synthetic construct
  source 1..20: mol_type = other RNA
gttttattcatttttaatct

SEQ ID NO: 10560 - RNA, 20 nt, synthetic construct
  source 1..20: mol_type = other RNA
tagcctaagttgtttttcct

SEQ ID NO: 10561 - RNA, 20 nt, synthetic construct
  source 1..20: mol_type = other RNA
aaggcagtatgcttgttctc

SEQ ID NO: 10562 - RNA, 20 nt, synthetic construct
  source 1..20: mol_type = other RNA
cctagagtctcacttaaagg

SEQ ID NO: 10563 - RNA, 20 nt, synthetic construct
  source 1..20: mol_type = other RNA
tagagtctcacttaaaggct

SEQ ID NO: 10564 - RNA, 20 nt, synthetic construct
  source 1..20: mol_type = other RNA
aggagagcatctttttgctc

SEQ ID NO: 10565 - RNA, 20 nt, synthetic construct
  source 1..20: mol_type = other RNA
cttaaaggctatctggctat

SEQ ID NO: 10566 - RNA, 20 nt, synthetic construct
  source 1..20: mol_type = other RNA
tttaactgaggtcttacctt

SEQ ID NO: 10567 - RNA, 20 nt, synthetic construct
  source 1..20: mol_type = other RNA
gttaaacgagtgatagccag

SEQ ID NO: 10568 - RNA, 20 nt, synthetic construct
  source 1..20: mol_type = other RNA
ttacagaaacagcagtacac

SEQ ID NO: 10569 - RNA, 20 nt, synthetic construct
  source 1..20: mol_type = other RNA
atgagtgccaagagcgagcc

SEQ ID NO: 10570 - RNA, 20 nt, synthetic construct
  source 1..20: mol_type = other RNA
ttgagatggtagtgtactgc

SEQ ID NO: 10571 - RNA, 20 nt, synthetic construct
  source 1..20: mol_type = other RNA
tggcactcattgagatggta

SEQ ID NO: 10572 - RNA, 20 nt, synthetic construct
  source 1..20: mol_type = other RNA
ctcttggcactcattgagat

SEQ ID NO: 10573 - RNA, 20 nt, synthetic construct
  source 1..20: mol_type = other RNA
cgcaaagcaaacattacctg

SEQ ID NO: 10574 - RNA, 20 nt, synthetic construct
  source 1..20: mol_type = other RNA
tgtcacagttaacactccat

SEQ ID NO: 10575 - RNA, 20 nt, synthetic construct
  source 1..20: mol_type = other RNA
atctgttgttgctgccttta

SEQ ID NO: 10576 - RNA, 20 nt, synthetic construct
  source 1..20: mol_type = other RNA
tgaaaaagtgcacatttgca

SEQ ID NO: 10577 - RNA, 20 nt, synthetic construct
  source 1..20: mol_type = other RNA
cacaattaaaataatcacca

SEQ ID NO: 10578 - RNA, 20 nt, synthetic construct
  source 1..20: mol_type = other RNA
atcttccagtccttcttccc

SEQ ID NO: 10579 - RNA, 20 nt, synthetic construct
  source 1..20: mol_type = other RNA
gctggaaggggaaggttgga

SEQ ID NO: 10580 - RNA, 20 nt, synthetic construct
  source 1..20: mol_type = other RNA
atccaaccttccccttccag

SEQ ID NO: 10581 - RNA, 20 nt, synthetic construct
  source 1..20: mol_type = other RNA
tcctcaatccaaccttcccc

SEQ ID NO: 10582 - RNA, 20 nt, synthetic construct
  source 1..20: mol_type = other RNA
atcatggtgcctgtgtggct

SEQ ID NO: 10583 - RNA, 20 nt, synthetic construct
  source 1..20: mol_type = other RNA
ccatcatggtgcctgtgtgg

SEQ ID NO: 10584 - RNA, 20 nt, synthetic construct
  source 1..20: mol_type = other RNA
gctctccatcatggtgcctg

SEQ ID NO: 10585 - RNA, 20 nt, synthetic construct
  source 1..20: mol_type = other RNA
cagctctccatcatggtgcc

SEQ ID NO: 10586 - RNA, 20 nt, synthetic construct
  source 1..20: mol_type = other RNA
tgaggtttaacaacacacgt

SEQ ID NO: 10587 - RNA, 20 nt, synthetic construct
  source 1..20: mol_type = other RNA
ggagtgtgggtgggctgctc

SEQ ID NO: 10588 - RNA, 20 nt, synthetic construct
  source 1..20: mol_type = other RNA
gaaccacgtgtgttgttaaa

SEQ ID NO: 10589 - RNA, 20 nt, synthetic construct
  source 1..20: mol_type = other RNA
tttgtgtgttcctggtcctg

SEQ ID NO: 10590 - RNA, 20 nt, synthetic construct
  source 1..20: mol_type = other RNA
acaattaacgaaatgatttt

SEQ ID NO: 10591 - RNA, 20 nt, synthetic construct
  source 1..20: mol_type = other RNA
ctctggggccctgatgggta

SEQ ID NO: 10592 - RNA, 20 nt, synthetic construct
  source 1..20: mol_type = other RNA
ggggccctgatgggtagctg

SEQ ID NO: 10593 - RNA, 20 nt, synthetic construct
  source 1..20: mol_type = other RNA
aggtccagcccagccagcta

SEQ ID NO: 10594 - RNA, 20 nt, synthetic construct
  source 1..20: mol_type = other RNA
tccactaattatttcttttt

SEQ ID NO: 10595 - RNA, 20 nt, synthetic construct
  source 1..20: mol_type = other RNA
tcatgccaaacataactcgt

SEQ ID NO: 10596 - RNA, 20 nt, synthetic construct
  source 1..20: mol_type = other RNA
taacaaaaagcaattttcct

SEQ ID NO: 10597 - RNA, 20 nt, synthetic construct
  source 1..20: mol_type = other RNA
aacaggagggaaaaaaatgg

SEQ ID NO: 10598 - RNA, 20 nt, synthetic construct
  source 1..20: mol_type = other RNA
tgtttgaggaaaattgcttt

SEQ ID NO: 10599 - RNA, 20 nt, synthetic construct
  source 1..20: mol_type = other RNA
aacaggtaaggtttcccttc

SEQ ID NO: 10600 - RNA, 20 nt, synthetic construct
  source 1..20: mol_type = other RNA
tcatggaggggcaacagagg

SEQ ID NO: 10601 - RNA, 20 nt, synthetic construct
  source 1..20: mol_type = other RNA
tggaggggcaacagagggct

SEQ ID NO: 10602 - RNA, 20 nt, synthetic construct
  source 1..20: mol_type = other RNA
atgaggaggtagaagccttg

SEQ ID NO: 10603 - RNA, 20 nt, synthetic construct
  source 1..20: mol_type = other RNA
gttgcccctccatgaggagg

SEQ ID NO: 10604 - RNA, 20 nt, synthetic construct
  source 1..20: mol_type = other RNA
agccctctgttgcccctcca

SEQ ID NO: 10605 - RNA, 20 nt, synthetic construct
  source 1..20: mol_type = other RNA
ctcaagccctctgttgcccc

SEQ ID NO: 10606 - RNA, 20 nt, synthetic construct
  source 1..20: mol_type = other RNA
tggcatatttaagcaacgac

SEQ ID NO: 10607 - RNA, 20 nt, synthetic construct
  source 1..20: mol_type = other RNA
taaagctcctggcatattta

SEQ ID NO: 10608 - RNA, 20 nt, synthetic construct
  source 1..20: mol_type = other RNA
cctggtgttactccacaaaa

SEQ ID NO: 10609 - RNA, 20 nt, synthetic construct
  source 1..20: mol_type = other RNA
acaaaatacacatccataag

SEQ ID NO: 10610 - RNA, 20 nt, synthetic construct
  source 1..20: mol_type = other RNA
ttcaagactcgcacacacac

SEQ ID NO: 10611 - RNA, 20 nt, synthetic construct
  source 1..20: mol_type = other RNA
cacacacactgagtactctc

SEQ ID NO: 10612 - RNA, 20 nt, synthetic construct
  source 1..20: mol_type = other RNA
gtgtgtgtgcgagtcttgaa

SEQ ID NO: 10613 - RNA, 20 nt, synthetic construct
  source 1..20: mol_type = other RNA
cacagagtactcacacactg

SEQ ID NO: 10614 - RNA, 20 nt, synthetic construct
  source 1..20: mol_type = other RNA
cagagtactcacacactgag

SEQ ID NO: 10615 - RNA, 20 nt, synthetic construct
  source 1..20: mol_type = other RNA
gtgagagtactcagtgtgtg

SEQ ID NO: 10616 - RNA, 20 nt, synthetic construct
  source 1..20: mol_type = other RNA
cacactgagtactcacacac

SEQ ID NO: 10617 - RNA, 20 nt, synthetic construct
  source 1..20: mol_type = other RNA
gtgtgtgagtactctgtgag

SEQ ID NO: 10618 - RNA, 20 nt, synthetic construct
  source 1..20: mol_type = other RNA
cacactgagtactcgcagag

SEQ ID NO: 10619 - RNA, 20 nt, synthetic construct
  source 1..20: mol_type = other RNA
gtgtgtgagtactcagtgtg

SEQ ID NO: 10620 - RNA, 20 nt, synthetic construct
  source 1..20: mol_type = other RNA
cagagtacttgcacacacag

SEQ ID NO: 10621 - RNA, 20 nt, synthetic construct
  source 1..20: mol_type = other RNA
gcgagtactcagtgtgtgag

SEQ ID NO: 10622 - RNA, 20 nt, synthetic construct
  source 1..20: mol_type = other RNA
cacacagagtactcgtgcac

SEQ ID NO: 10623 - RNA, 20 nt, synthetic construct
  source 1..20: mol_type = other RNA
gtgtgtgagtactgtgtgtg

SEQ ID NO: 10624 - RNA, 20 nt, synthetic construct
  source 1..20: mol_type = other RNA
tgcacactgagcactcacac

SEQ ID NO: 10625 - RNA, 20 nt, synthetic construct
  source 1..20: mol_type = other RNA
gtgtgcacgagtactctgtg

SEQ ID NO: 10626 - RNA, 20 nt, synthetic construct
  source 1..20: mol_type = other RNA
cacacagtactcgcacacac

SEQ ID NO: 10627 - RNA, 20 nt, synthetic construct
  source 1..20: mol_type = other RNA
cacacacagagaactcgcac

SEQ ID NO: 10628 - RNA, 20 nt, synthetic construct
  source 1..20: mol_type = other RNA
gtgtgtgcgagtactgtgtg

SEQ ID NO: 10629 - RNA, 20 nt, synthetic construct
  source 1..20: mol_type = other RNA
cacacagagtactcgcacac

SEQ ID NO: 10630 - RNA, 20 nt, synthetic construct
  source 1..20: mol_type = other RNA
gtgtgcgagttctctgtgtg

SEQ ID NO: 10631 - RNA, 20 nt, synthetic construct
  source 1..20: mol_type = other RNA
cacacacactgagtactcac

SEQ ID NO: 10632 - RNA, 20 nt, synthetic construct
  source 1..20: mol_type = other RNA
gtgtgtgtgcgagtactctg

SEQ ID NO: 10633 - RNA, 20 nt, synthetic construct
  source 1..20: mol_type = other RNA
caaacacactgagtactcac

SEQ ID NO: 10634 - RNA, 20 nt, synthetic construct
  source 1..20: mol_type = other RNA
gtgtgtttgtgagtactcag

SEQ ID NO: 10635 - RNA, 20 nt, synthetic construct
  source 1..20: mol_type = other RNA
cacagcggatccctcacagt

SEQ ID NO: 10636 - RNA, 20 nt, synthetic construct
  source 1..20: mol_type = other RNA
cagtctaggggggataccta

SEQ ID NO: 10637 - RNA, 20 nt, synthetic construct
  source 1..20: mol_type = other RNA
ataatctttcaaagaggtaa

SEQ ID NO: 10638 - RNA, 20 nt, synthetic construct
  source 1..20: mol_type = other RNA
ttgaaagattatggagtggg

SEQ ID NO: 10639 - RNA, 20 nt, synthetic construct
  source 1..20: mol_type = other RNA
actgtatcttcagtggcagc

SEQ ID NO: 10640 - RNA, 20 nt, synthetic construct
  source 1..20: mol_type = other RNA
aacaactgttctcaaataat

SEQ ID NO: 10641 - RNA, 20 nt, synthetic construct
  source 1..20: mol_type = other RNA
aataatggctaacaccacct

SEQ ID NO: 10642 - RNA, 20 nt, synthetic construct
  source 1..20: mol_type = other RNA
ttctatatgggttgattctg

SEQ ID NO: 10643 - RNA, 20 nt, synthetic construct
  source 1..20: mol_type = other RNA
caaaattaggtagctttgtc

SEQ ID NO: 10644 - RNA, 20 nt, synthetic construct
  source 1..20: mol_type = other RNA
tctaaaaagacaaagctacc

SEQ ID NO: 10645 - RNA, 20 nt, synthetic construct
  source 1..20: mol_type = other RNA
aactcatctaaaaagacaaa

SEQ ID NO: 10646 - RNA, 20 nt, synthetic construct
  source 1..20: mol_type = other RNA
gccttataacacaaccacct

SEQ ID NO: 10647 - RNA, 20 nt, synthetic construct
  source 1..20: mol_type = other RNA
ggtggttgtgttataaggca

SEQ ID NO: 10648 - RNA, 20 nt, synthetic construct
  source 1..20: mol_type = other RNA
aatgtccctttagagagtca

SEQ ID NO: 10649 - RNA, 20 nt, synthetic construct
  source 1..20: mol_type = other RNA
aaagggacattggaggaaca

SEQ ID NO: 10650 - RNA, 20 nt, synthetic construct
  source 1..20: mol_type = other RNA
ctaaagggacattggaggaa

SEQ ID NO: 10651 - RNA, 20 nt, synthetic construct
  source 1..20: mol_type = other RNA
atcagaaggatgctctgtgt

SEQ ID NO: 10652 - RNA, 20 nt, synthetic construct
  source 1..20: mol_type = other RNA
gtgtttttatttagtttcct

SEQ ID NO: 10653 - RNA, 20 nt, synthetic construct
  source 1..20: mol_type = other RNA
gacccagaagctactaggaa

SEQ ID NO: 10654 - RNA, 20 nt, synthetic construct
  source 1..20: mol_type = other RNA
acaaggtcatacagctagtt

SEQ ID NO: 10655 - RNA, 20 nt, synthetic construct
  source 1..20: mol_type = other RNA
tcataggtttgttacgggga

SEQ ID NO: 10656 - RNA, 20 nt, synthetic construct
  source 1..20: mol_type = other RNA
taggtttgttacggggatca

SEQ ID NO: 10657 - RNA, 20 nt, synthetic construct
  source 1..20: mol_type = other RNA
tcctgggtcttgtcatgata

SEQ ID NO: 10658 - RNA, 20 nt, synthetic construct
  source 1..20: mol_type = other RNA
cagaactaataacacagtca

SEQ ID NO: 10659 - RNA, 20 nt, synthetic construct
  source 1..20: mol_type = other RNA
ttatctcattatacctgggg

SEQ ID NO: 10660 - RNA, 20 nt, synthetic construct
  source 1..20: mol_type = other RNA
ttatacctggggaattatgt

SEQ ID NO: 10661 - RNA, 20 nt, synthetic construct
  source 1..20: mol_type = other RNA
aaacataattccccaggtat

SEQ ID NO: 10662 - RNA, 20 nt, synthetic construct
  source 1..20: mol_type = other RNA
tagtttcgtgaacctgaccg

SEQ ID NO: 10663 - RNA, 20 nt, synthetic construct
  source 1..20: mol_type = other RNA
agcccacaccatggctattt

SEQ ID NO: 10664 - RNA, 20 nt, synthetic construct
  source 1..20: mol_type = other RNA
tttatcaccttaatttgaac

SEQ ID NO: 10665 - RNA, 20 nt, synthetic construct
  source 1..20: mol_type = other RNA
gaattagcttttaatcctaa

SEQ ID NO: 10666 - RNA, 20 nt, synthetic construct
  source 1..20: mol_type = other RNA
ttaggattaaaagctaattc

SEQ ID NO: 10667 - RNA, 20 nt, synthetic construct
  source 1..20: mol_type = other RNA
cacctctcccaaatgaatga

SEQ ID NO: 10668 - RNA, 20 nt, synthetic construct
  source 1..20: mol_type = other RNA
cctctcccaaatgaatgatg

SEQ ID NO: 10669 - RNA, 20 nt, synthetic construct
  source 1..20: mol_type = other RNA
cccaaatgaatgatgactca

SEQ ID NO: 10670 - RNA, 20 nt, synthetic construct
  source 1..20: mol_type = other RNA
caaatgaatgatgactcact

SEQ ID NO: 10671 - RNA, 20 nt, synthetic construct
  source 1..20: mol_type = other RNA
ctttctcttatggcaaacta

SEQ ID NO: 10672 - RNA, 20 nt, synthetic construct
  source 1..20: mol_type = other RNA
tatggcaaactagtaaaata

SEQ ID NO: 10673 - RNA, 20 nt, synthetic construct
  source 1..20: mol_type = other RNA
actagcaagtagtcgaatga

SEQ ID NO: 10674 - RNA, 20 nt, synthetic construct
  source 1..20: mol_type = other RNA
ttcgactacttgctagttga

SEQ ID NO: 10675 - RNA, 20 nt, synthetic construct
  source 1..20: mol_type = other RNA
tgtttctcattcgactactt

SEQ ID NO: 10676 - RNA, 20 nt, synthetic construct
  source 1..20: mol_type = other RNA
ccaagctagacaaattcagt

SEQ ID NO: 10677 - RNA, 20 nt, synthetic construct
  source 1..20: mol_type = other RNA
aagctagacaaattcagtat

SEQ ID NO: 10678 - RNA, 20 nt, synthetic construct
  source 1..20: mol_type = other RNA
tcattctaagatatgttaag

SEQ ID NO: 10679 - RNA, 20 nt, synthetic construct
  source 1..20: mol_type = other RNA
tcccaaaggaatgttggtaa

SEQ ID NO: 10680 - RNA, 20 nt, synthetic construct
  source 1..20: mol_type = other RNA
tgcttgtgctgaactccatc

SEQ ID NO: 10681 - RNA, 20 nt, synthetic construct
  source 1..20: mol_type = other RNA
atcgacgtatctgtcatcag

SEQ ID NO: 10682 - RNA, 20 nt, synthetic construct
  source 1..20: mol_type = other RNA
tcatattatttctgacgaca

SEQ ID NO: 10683 - RNA, 20 nt, synthetic construct
  source 1..20: mol_type = other RNA
gtgcttgacagaagaggtca

SEQ ID NO: 10684 - RNA, 20 nt, synthetic construct
  source 1..20: mol_type = other RNA
tctgtcaagcactgagaaat

SEQ ID NO: 10685 - RNA, 20 nt, synthetic construct
  source 1..20: mol_type = other RNA
aagggttatattaactcata

SEQ ID NO: 10686 - RNA, 20 nt, synthetic construct
  source 1..20: mol_type = other RNA
tattctaaaaccagtccctt

SEQ ID NO: 10687 - RNA, 20 nt, synthetic construct
  source 1..20: mol_type = other RNA
gtacctacagtgaatccata

SEQ ID NO: 10688 - RNA, 20 nt, synthetic construct
  source 1..20: mol_type = other RNA
gtataatgggaaaaactctg

SEQ ID NO: 10689 - RNA, 20 nt, synthetic construct
  source 1..20: mol_type = other RNA
gaggctggagatctgcaggt

SEQ ID NO: 10690 - RNA, 20 nt, synthetic construct
  source 1..20: mol_type = other RNA
gagtttttcccattatactg

SEQ ID NO: 10691 - RNA, 20 nt, synthetic construct
  source 1..20: mol_type = other RNA
agcctcagagtttttcccat

SEQ ID NO: 10692 - RNA, 20 nt, synthetic construct
  source 1..20: mol_type = other RNA
accactcactgtgccgcgta

SEQ ID NO: 10693 - RNA, 20 nt, synthetic construct
  source 1..20: mol_type = other RNA
ctgtgccgcgtaatgtgagt

SEQ ID NO: 10694 - RNA, 20 nt, synthetic construct
  source 1..20: mol_type = other RNA
cattacgcggcacagtgagt

SEQ ID NO: 10695 - RNA, 20 nt, synthetic construct
  source 1..20: mol_type = other RNA
ctcacattacgcggcacagt

SEQ ID NO: 10696 - RNA, 20 nt, synthetic construct
  source 1..20: mol_type = other RNA
agatactgttgtggtgaaga

SEQ ID NO: 10697 - RNA, 20 nt, synthetic construct
  source 1..20: mol_type = other RNA
gccagtacatgaagaactca

SEQ ID NO: 10698 - RNA, 20 nt, synthetic construct
  source 1..20: mol_type = other RNA
ctattctgcctactttgtga

SEQ ID NO: 10699 - RNA, 20 nt, synthetic construct
  source 1..20: mol_type = other RNA
aaatcacaaagtaggcagaa

SEQ ID NO: 10700 - RNA, 20 nt, synthetic construct
  source 1..20: mol_type = other RNA
acaaatgcaaaatagtatta

SEQ ID NO: 10701 - RNA, 20 nt, synthetic construct
  source 1..20: mol_type = other RNA
tccatatccaaggccccatt

SEQ ID NO: 10702 - RNA, 20 nt, synthetic construct
  source 1..20: mol_type = other RNA
gtgtgtggatactatgttga

SEQ ID NO: 10703 - RNA, 20 nt, synthetic construct
  source 1..20: mol_type = other RNA
ttagtgttaaaaaaacaagt

SEQ ID NO: 10704 - RNA, 20 nt, synthetic construct
  source 1..20: mol_type = other RNA
gctttctctttagtgttaaa

SEQ ID NO: 10705 - RNA, 20 nt, synthetic construct
  source 1..20: mol_type = other RNA
cagctttctctttagtgtta

SEQ ID NO: 10706 - RNA, 20 nt, synthetic construct
  source 1..20: mol_type = other RNA
cttagcaggaaaggaaaaat

SEQ ID NO: 10707 - RNA, 20 nt, synthetic construct
  source 1..20: mol_type = other RNA
ggctttgacaccagcagagc

SEQ ID NO: 10708 - RNA, 20 nt, synthetic construct
  source 1..20: mol_type = other RNA
gctggtgtcaaagccagagt

SEQ ID NO: 10709 - RNA, 20 nt, synthetic construct
  source 1..20: mol_type = other RNA
accaatgcattagctttgtg

SEQ ID NO: 10710 - RNA, 20 nt, synthetic construct
  source 1..20: mol_type = other RNA
gagctttactccttgcctga

SEQ ID NO: 10711 - RNA, 20 nt, synthetic construct
  source 1..20: mol_type = other RNA
gagatgttaagtaagttgtc

SEQ ID NO: 10712 - RNA, 20 nt, synthetic construct
  source 1..20: mol_type = other RNA
ttgcctgagaatggggatga

SEQ ID NO: 10713 - RNA, 20 nt, synthetic construct
  source 1..20: mol_type = other RNA
ggcaaggagtaaagctcaga

SEQ ID NO: 10714 - RNA, 20 nt, synthetic construct
  source 1..20: mol_type = other RNA
cagttcatcaaaattaagca

SEQ ID NO: 10715 - RNA, 20 nt, synthetic construct
  source 1..20: mol_type = other RNA
ataaatagtacttattacca

SEQ ID NO: 10716 - RNA, 20 nt, synthetic construct
  source 1..20: mol_type = other RNA
catccatcgtatttctttta

SEQ ID NO: 10717 - RNA, 20 nt, synthetic construct
  source 1..20: mol_type = other RNA
tgtttgaaattgctttattg

SEQ ID NO: 10718 - RNA, 20 nt, synthetic construct
  source 1..20: mol_type = other RNA
cctgtttgaaattgctttat

SEQ ID NO: 10719 - RNA, 20 nt, synthetic construct
  source 1..20: mol_type = other RNA
gtaagccgaggtgggcagat

SEQ ID NO: 10720 - RNA, 20 nt, synthetic construct
  source 1..20: mol_type = other RNA
gcttaccgaggttgttttgt

SEQ ID NO: 10721 - RNA, 20 nt, synthetic construct
  source 1..20: mol_type = other RNA
agtgatctgcccacctcggc

SEQ ID NO: 10722 - RNA, 20 nt, synthetic construct
  source 1..20: mol_type = other RNA
tgggctcaagtgatctgccc

SEQ ID NO: 10723 - RNA, 20 nt, synthetic construct
  source 1..20: mol_type = other RNA
aactcctgggctcaagtgat

SEQ ID NO: 10724 - RNA, 20 nt, synthetic construct
  source 1..20: mol_type = other RNA
gccccctggtagctgggact

SEQ ID NO: 10725 - RNA, 20 nt, synthetic construct
  source 1..20: mol_type = other RNA
tcagccccctggtagctggg

SEQ ID NO: 10726 - RNA, 20 nt, synthetic construct
  source 1..20: mol_type = other RNA
ctcctcagccccctggtagc

SEQ ID NO: 10727 - RNA, 20 nt, synthetic construct
  source 1..20: mol_type = other RNA
aatctgggtgacagcaaacc

SEQ ID NO: 10728 - RNA, 20 nt, synthetic construct
  source 1..20: mol_type = other RNA
gtcaccaggtttgctgtcac

SEQ ID NO: 10729 - RNA, 20 nt, synthetic construct
  source 1..20: mol_type = other RNA
ctctgtcaccaggtttgctg

SEQ ID NO: 10730 - RNA, 20 nt, synthetic construct
  source 1..20: mol_type = other RNA
aacagacaacaaacaaaaaa

SEQ ID NO: 10731 - RNA, 20 nt, synthetic construct
  source 1..20: mol_type = other RNA
tgttcaaatgaaaaggaagt

SEQ ID NO: 10732 - RNA, 20 nt, synthetic construct
  source 1..20: mol_type = other RNA
ggggctgtgaacaaggctgt

SEQ ID NO: 10733 - RNA, 20 nt, synthetic construct
  source 1..20: mol_type = other RNA
ctggggctgtgaacaaggct

SEQ ID NO: 10734 - RNA, 20 nt, synthetic construct
  source 1..20: mol_type = other RNA
ccagtcagaatccacctttc

SEQ ID NO: 10735 - RNA, 20 nt, synthetic construct
  source 1..20: mol_type = other RNA
tatgactttgtcactagtta

SEQ ID NO: 10736 - RNA, 20 nt, synthetic construct
  source 1..20: mol_type = other RNA
aaagaattttcaagtctcta

SEQ ID NO: 10737 - RNA, 20 nt, synthetic construct
  source 1..20: mol_type = other RNA
atggtactactacttagact

SEQ ID NO: 10738 - RNA, 20 nt, synthetic construct
  source 1..20: mol_type = other RNA
taggggccagtcggcaaaac

SEQ ID NO: 10739 - RNA, 20 nt, synthetic construct
  source 1..20: mol_type = other RNA
gcggcacatgatcagcttcc

SEQ ID NO: 10740 - RNA, 20 nt, synthetic construct
  source 1..20: mol_type = other RNA
gaagaagatctccagcccta

SEQ ID NO: 10741 - RNA, 20 nt, synthetic construct
  source 1..20: mol_type = other RNA
agccctaattccttgctgtc

SEQ ID NO: 10742 - RNA, 20 nt, synthetic construct
  source 1..20: mol_type = other RNA
atatcttgtgacagcaagga

SEQ ID NO: 10743 - RNA, 20 nt, synthetic construct
  source 1..20: mol_type = other RNA
ttaaaactttccatttagct

SEQ ID NO: 10744 - RNA, 20 nt, synthetic construct
  source 1..20: mol_type = other RNA
tgagcctcacattgcttcac

SEQ ID NO: 10745 - RNA, 20 nt, synthetic construct
  source 1..20: mol_type = other RNA
ggagtttttttaattagatt

SEQ ID NO: 10746 - RNA, 20 nt, synthetic construct
  source 1..20: mol_type = other RNA
cattgcttcacaataactac

SEQ ID NO: 10747 - RNA, 20 nt, synthetic construct
  source 1..20: mol_type = other RNA
ttgatagcagtagaagtctg

SEQ ID NO: 10748 - RNA, 20 nt, synthetic construct
  source 1..20: mol_type = other RNA
tcagaattcttacaagtaat

SEQ ID NO: 10749 - RNA, 20 nt, synthetic construct
  source 1..20: mol_type = other RNA
aaaaaatttttagactggat

SEQ ID NO: 10750 - RNA, 20 nt, synthetic construct
  source 1..20: mol_type = other RNA
gtactttttcctgttcaaca

SEQ ID NO: 10751 - RNA, 20 nt, synthetic construct
  source 1..20: mol_type = other RNA
gttggacaaagacgtcccag

SEQ ID NO: 10752 - RNA, 20 nt, synthetic construct
  source 1..20: mol_type = other RNA
agtaactgatgaaggctttt

SEQ ID NO: 10753 - RNA, 20 nt, synthetic construct
  source 1..20: mol_type = other RNA
aaccagttaaaaagccttca

SEQ ID NO: 10754 - RNA, 20 nt, synthetic construct
  source 1..20: mol_type = other RNA
aattaatcctgttataaatg

SEQ ID NO: 10755 - RNA, 20 nt, synthetic construct
  source 1..20: mol_type = other RNA
gattcagatggacttatgct

SEQ ID NO: 10756 - RNA, 20 nt, synthetic construct
  source 1..20: mol_type = other RNA
tcaaagcataagtccatctg

SEQ ID NO: 10757 - RNA, 20 nt, synthetic construct
  source 1..20: mol_type = other RNA
ggaaggtaaaatggataatt

SEQ ID NO: 10758 - RNA, 20 nt, synthetic construct
  source 1..20: mol_type = other RNA
gaaatctaggaactgaaact

SEQ ID NO: 10759 - RNA, 20 nt, synthetic construct
  source 1..20: mol_type = other RNA
gcggtagaattgatgccctt

SEQ ID NO: 10760 - RNA, 20 nt, synthetic construct
  source 1..20: mol_type = other RNA
agagccagtatctctctgtc

SEQ ID NO: 10761 - RNA, 20 nt, synthetic construct
  source 1..20: mol_type = other RNA
ggagaaaatgtgactcagcg

SEQ ID NO: 10762 - RNA, 20 nt, synthetic construct
  source 1..20: mol_type = other RNA
ctgtctcttaaaaaaaggtg

SEQ ID NO: 10763 - RNA, 20 nt, synthetic construct
  source 1..20: mol_type = other RNA
gtctcttaaaaaaaggtggg

SEQ ID NO: 10764 - RNA, 20 nt, synthetic construct
  source 1..20: mol_type = other RNA
taaaaaaaggtggggtgttt

SEQ ID NO: 10765 - RNA, 20 nt, synthetic construct
  source 1..20: mol_type = other RNA
ctccactacgttacttcttc

SEQ ID NO: 10766 - RNA, 20 nt, synthetic construct
  source 1..20: mol_type = other RNA
actacgttacttcttcacat

SEQ ID NO: 10767 - RNA, 20 nt, synthetic construct
  source 1..20: mol_type = other RNA
atcggcttggtttccagccc

SEQ ID NO: 10768 - RNA, 20 nt, synthetic construct
  source 1..20: mol_type = other RNA
gccgtgaacttacttgagag

SEQ ID NO: 10769 - RNA, 20 nt, synthetic construct
  source 1..20: mol_type = other RNA
agtaagttcacggctgagtc

SEQ ID NO: 10770 - RNA, 20 nt, synthetic construct
  source 1..20: mol_type = other RNA
caagtaagttcacggctgag

SEQ ID NO: 10771 - RNA, 20 nt, synthetic construct
  source 1..20: mol_type = other RNA
tggaaagctttgaaaaacat

SEQ ID NO: 10772 - RNA, 20 nt, synthetic construct
  source 1..20: mol_type = other RNA
caccccaactgtttttggac

SEQ ID NO: 10773 - RNA, 20 nt, synthetic construct
  source 1..20: mol_type = other RNA
cattagttcgtttcctctga

SEQ ID NO: 10774 - RNA, 20 nt, synthetic construct
  source 1..20: mol_type = other RNA
ttagttcgtttcctctgaag

SEQ ID NO: 10775 - RNA, 20 nt, synthetic construct
  source 1..20: mol_type = other RNA
gaagatggtattcatacttc

SEQ ID NO: 10776 - RNA, 20 nt, synthetic construct
  source 1..20: mol_type = other RNA
tgccacccactttatcttgt

SEQ ID NO: 10777 - RNA, 20 nt, synthetic construct
  source 1..20: mol_type = other RNA
ccccgtaaatggaaatggtg

SEQ ID NO: 10778 - RNA, 20 nt, synthetic construct
  source 1..20: mol_type = other RNA
gtgaattctgtctgatgccc

SEQ ID NO: 10779 - RNA, 20 nt, synthetic construct
  source 1..20: mol_type = other RNA
ttctgccgcctgctgtcctg

SEQ ID NO: 10780 - RNA, 20 nt, synthetic construct
  source 1..20: mol_type = other RNA
aaaggcaggacagcaggcgg

SEQ ID NO: 10781 - RNA, 20 nt, synthetic construct
  source 1..20: mol_type = other RNA
agggaggctgcactaactct

SEQ ID NO: 10782 - RNA, 20 nt, synthetic construct
  source 1..20: mol_type = other RNA
ctagagatggggtcaggccg

SEQ ID NO: 10783 - RNA, 20 nt, synthetic construct
  source 1..20: mol_type = other RNA
gcctttatcctttgtttggg

SEQ ID NO: 10784 - RNA, 20 nt, synthetic construct
  source 1..20: mol_type = other RNA
aagttgcacagcaaagccaa

SEQ ID NO: 10785 - RNA, 20 nt, synthetic construct
  source 1..20: mol_type = other RNA
atgaactaaatacagattct

SEQ ID NO: 10786 - RNA, 20 nt, synthetic construct
  source 1..20: mol_type = other RNA
agctaatgtttataagaagc

SEQ ID NO: 10787 - RNA, 20 nt, synthetic construct
  source 1..20: mol_type = other RNA
cttttcagagtcctttctca

SEQ ID NO: 10788 - RNA, 20 nt, synthetic construct
  source 1..20: mol_type = other RNA
agaaacactcccttttcaga

SEQ ID NO: 10789 - RNA, 20 nt, synthetic construct
  source 1..20: mol_type = other RNA
ctagaaacactcccttttca

SEQ ID NO: 10790 - RNA, 20 nt, synthetic construct
  source 1..20: mol_type = other RNA
ttcttattacctgcaattta

SEQ ID NO: 10791 - RNA, 20 nt, synthetic construct
  source 1..20: mol_type = other RNA
tttttaaaacgttatttata

SEQ ID NO: 10792 - RNA, 20 nt, synthetic construct
  source 1..20: mol_type = other RNA
agaatggtggccacagcaac

SEQ ID NO: 10793 - RNA, 20 nt, synthetic construct
  source 1..20: mol_type = other RNA
tacttctctcacattgcact

SEQ ID NO: 10794 - RNA, 20 nt, synthetic construct
  source 1..20: mol_type = other RNA
cacattgcactccagtaaga

SEQ ID NO: 10795 - RNA, 20 nt, synthetic construct
  source 1..20: mol_type = other RNA
cattgcactccagtaagaaa

SEQ ID NO: 10796 - RNA, 20 nt, synthetic construct
  source 1..20: mol_type = other RNA
agtaagaaaatcctgaaaga

SEQ ID NO: 10797 - RNA, 20 nt, synthetic construct
  source 1..20: mol_type = other RNA
ttctttcaggattttcttac

SEQ ID NO: 10798 - RNA, 20 nt, synthetic construct
  source 1..20: mol_type = other RNA
gaagtattttaaattgcaga

SEQ ID NO: 10799 - RNA, 20 nt, synthetic construct
  source 1..20: mol_type = other RNA
ctgaagtattttaaattgca

SEQ ID NO: 10800 - RNA, 20 nt, synthetic construct
  source 1..20: mol_type = other RNA
tattttagtaactttaaaca

SEQ ID NO: 10801 - RNA, 20 nt, synthetic construct
  source 1..20: mol_type = other RNA
tcactatcaattgctatgat

SEQ ID NO: 10802 - RNA, 20 nt, synthetic construct
  source 1..20: mol_type = other RNA
atcaggaagaatgtagaagt

SEQ ID NO: 10803 - RNA, 20 nt, synthetic construct
  source 1..20: mol_type = other RNA
agaatcccagtgaattactt

SEQ ID NO: 10804 - RNA, 20 nt, synthetic construct
  source 1..20: mol_type = other RNA
aatctatttcattcagcaac

SEQ ID NO: 10805 - RNA, 20 nt, synthetic construct
  source 1..20: mol_type = other RNA
tcttgtggtcactgaatact

SEQ ID NO: 10806 - RNA, 20 nt, synthetic construct
  source 1..20: mol_type = other RNA
ggcaagtattcagtgaccac

SEQ ID NO: 10807 - RNA, 20 nt, synthetic construct
  source 1..20: mol_type = other RNA
aaaatcatctcaggcaagta

SEQ ID NO: 10808 - RNA, 20 nt, synthetic construct
  source 1..20: mol_type = other RNA
ctgtttcagtgaagagagtt

SEQ ID NO: 10809 - RNA, 20 nt, synthetic construct
  source 1..20: mol_type = other RNA
aaatcactggaagagacaca

SEQ ID NO: 10810 - RNA, 20 nt, synthetic construct
  source 1..20: mol_type = other RNA
tccagtgatttagagctgaa

SEQ ID NO: 10811 - RNA, 20 nt, synthetic construct
  source 1..20: mol_type = other RNA
aacacttactttatcaattc

SEQ ID NO: 10812 - RNA, 20 nt, synthetic construct
  source 1..20: mol_type = other RNA
tccttcagaactaataaaat

SEQ ID NO: 10813 - RNA, 20 nt, synthetic construct
  source 1..20: mol_type = other RNA
taacattgctgtatctgctt

SEQ ID NO: 10814 - RNA, 20 nt, synthetic construct
  source 1..20: mol_type = other RNA
ttacacatggcccactattt

SEQ ID NO: 10815 - RNA, 20 nt, synthetic construct
  source 1..20: mol_type = other RNA
tgctctttacacatggccca

SEQ ID NO: 10816 - RNA, 20 nt, synthetic construct
  source 1..20: mol_type = other RNA
tcatcggtttttatcttcag

SEQ ID NO: 10817 - RNA, 20 nt, synthetic construct
  source 1..20: mol_type = other RNA
cgcctgtaatctctgcactt

SEQ ID NO: 10818 - RNA, 20 nt, synthetic construct
  source 1..20: mol_type = other RNA
gccttagaaactttacagac

SEQ ID NO: 10819 - RNA, 20 nt, synthetic construct
  source 1..20: mol_type = other RNA
ctgttgctaaaaatattgga

SEQ ID NO: 10820 - RNA, 20 nt, synthetic construct
  source 1..20: mol_type = other RNA
aatatttttagcaacaggga

SEQ ID NO: 10821 - RNA, 20 nt, synthetic construct
  source 1..20: mol_type = other RNA
ggacatacttccctgttcaa

SEQ ID NO: 10822 - RNA, 20 nt, synthetic construct
  source 1..20: mol_type = other RNA
ttatctggatatgattttgc

SEQ ID NO: 10823 - RNA, 20 nt, synthetic construct
  source 1..20: mol_type = other RNA
gtcacaacagattatcaaaa

SEQ ID NO: 10824 - RNA, 20 nt, synthetic construct
  source 1..20: mol_type = other RNA
cctgagtttcttctttgtcc

SEQ ID NO: 10825 - RNA, 20 nt, synthetic construct
  source 1..20: mol_type = other RNA
ggtgagaagtgatatgtttt

SEQ ID NO: 10826 - RNA, 20 nt, synthetic construct
  source 1..20: mol_type = other RNA
cctttgccatgcaaggataa

SEQ ID NO: 10827 - RNA, 20 nt, synthetic construct
  source 1..20: mol_type = other RNA
tagactaaattaaagcatcc

SEQ ID NO: 10828 - RNA, 20 nt, synthetic construct
  source 1..20: mol_type = other RNA
cttagactaaattaaagcat

SEQ ID NO: 10829 - RNA, 20 nt, synthetic construct
  source 1..20: mol_type = other RNA
ttcatgtttccctctcttag

SEQ ID NO: 10830 - RNA, 20 nt, synthetic construct
  source 1..20: mol_type = other RNA
caaaacagttgttagaccgc

SEQ ID NO: 10831 - RNA, 20 nt, synthetic construct
  source 1..20: mol_type = other RNA
aaacagttgttagaccgcag

SEQ ID NO: 10832 - RNA, 20 nt, synthetic construct
  source 1..20: mol_type = other RNA
acaaagaccaatatccattg

SEQ ID NO: 10833 - RNA, 20 nt, synthetic construct
  source 1..20: mol_type = other RNA
tgtcaatggatattggtctt

SEQ ID NO: 10834 - RNA, 20 nt, synthetic construct
  source 1..20: mol_type = other RNA
attcttcataaacttgaggt

SEQ ID NO: 10835 - RNA, 20 nt, synthetic construct
  source 1..20: mol_type = other RNA
agtttatgaagaatagagat

SEQ ID NO: 10836 - RNA, 20 nt, synthetic construct
  source 1..20: mol_type = other RNA
tctctcaccatctacaaaag

SEQ ID NO: 10837 - RNA, 20 nt, synthetic construct
  source 1..20: mol_type = other RNA
caccatctacaaaagaagat

SEQ ID NO: 10838 - RNA, 20 nt, synthetic construct
  source 1..20: mol_type = other RNA
ccatctacaaaagaagatta

SEQ ID NO: 10839 - RNA, 20 nt, synthetic construct
  source 1..20: mol_type = other RNA
agttttgaacttttaaaaga

SEQ ID NO: 10840 - RNA, 20 nt, synthetic construct
  source 1..20: mol_type = other RNA
tttaaaagttcaaaacttga

SEQ ID NO: 10841 - RNA, 20 nt, synthetic construct
  source 1..20: mol_type = other RNA
tcttttaaaagttcaaaact

SEQ ID NO: 10842 - RNA, 20 nt, synthetic construct
  source 1..20: mol_type = other RNA
cctcttttaaaagttcaaaa

SEQ ID NO: 10843 - RNA, 20 nt, synthetic construct
  source 1..20: mol_type = other RNA
ctcctcttttaaaagttcaa

SEQ ID NO: 10844 - RNA, 20 nt, synthetic construct
  source 1..20: mol_type = other RNA
gtccagactttatacactaa

SEQ ID NO: 10845 - RNA, 20 nt, synthetic construct
  source 1..20: mol_type = other RNA
ttttttggatggaaaaacag

SEQ ID NO: 10846 - RNA, 20 nt, synthetic construct
  source 1..20: mol_type = other RNA
aatataccaggtaagaacca

SEQ ID NO: 10847 - RNA, 20 nt, synthetic construct
  source 1..20: mol_type = other RNA
acaaacagtcctttcttctc

SEQ ID NO: 10848 - RNA, 20 nt, synthetic construct
  source 1..20: mol_type = other RNA
ccttttttaaccagcttggt

SEQ ID NO: 10849 - RNA, 20 nt, synthetic construct
  source 1..20: mol_type = other RNA
gccccataggccgaacaatg

SEQ ID NO: 10850 - RNA, 20 nt, synthetic construct
  source 1..20: mol_type = other RNA
gtcatcccctcggccccata

SEQ ID NO: 10851 - RNA, 20 nt, synthetic construct
  source 1..20: mol_type = other RNA
atcttcaccagaaatttcac

SEQ ID NO: 10852 - RNA, 20 nt, synthetic construct
  source 1..20: mol_type = other RNA
taggtcagctccatcttcac

SEQ ID NO: 10853 - RNA, 20 nt, synthetic construct
  source 1..20: mol_type = other RNA
gtctagtataaagtggctat

SEQ ID NO: 10854 - RNA, 20 nt, synthetic construct
  source 1..20: mol_type = other RNA
caactaattagaaagtattg

SEQ ID NO: 10855 - RNA, 20 nt, synthetic construct
  source 1..20: mol_type = other RNA
tatgccacttaagtaaaaat

SEQ ID NO: 10856 - RNA, 20 nt, synthetic construct
  source 1..20: mol_type = other RNA
caataatatgaaggaagaat

SEQ ID NO: 10857 - RNA, 20 nt, synthetic construct
  source 1..20: mol_type = other RNA
aagataagtttatttcactg

SEQ ID NO: 10858 - RNA, 20 nt, synthetic construct
  source 1..20: mol_type = other RNA
aagtcgtgtaagaacaaagt

SEQ ID NO: 10859 - RNA, 20 nt, synthetic construct
  source 1..20: mol_type = other RNA
catgaaaaagtaaacacttt

SEQ ID NO: 10860 - RNA, 20 nt, synthetic construct
  source 1..20: mol_type = other RNA
tccatgtaatttgctgtgtg

SEQ ID NO: 10861 - RNA, 20 nt, synthetic construct
  source 1..20: mol_type = other RNA
gtaagtgtctcttccatgta

SEQ ID NO: 10862 - RNA, 20 nt, synthetic construct
  source 1..20: mol_type = other RNA
ctgtaagtgtctcttccatg

SEQ ID NO: 10863 - RNA, 20 nt, synthetic construct
  source 1..20: mol_type = other RNA
ctctgtaagtgtctcttcca

SEQ ID NO: 10864 - RNA, 20 nt, synthetic construct
  source 1..20: mol_type = other RNA
gcttcctgccgtacaacgct

SEQ ID NO: 10865 - RNA, 20 nt, synthetic construct
  source 1..20: mol_type = other RNA
acttttctttggtaatactg

SEQ ID NO: 10866 - RNA, 20 nt, synthetic construct
  source 1..20: mol_type = other RNA
ccagtattaccaaagaaaag

SEQ ID NO: 10867 - RNA, 20 nt, synthetic construct
  source 1..20: mol_type = other RNA
aaagacactcacattttact

SEQ ID NO: 10868 - RNA, 20 nt, synthetic construct
  source 1..20: mol_type = other RNA
cacttggaagtgatataggt

SEQ ID NO: 10869 - RNA, 20 nt, synthetic construct
  source 1..20: mol_type = other RNA
cttggaagtgatataggtgg

SEQ ID NO: 10870 - RNA, 20 nt, synthetic construct
  source 1..20: mol_type = other RNA
aattagtcacacctctacat

SEQ ID NO: 10871 - RNA, 20 nt, synthetic construct
  source 1..20: mol_type = other RNA
acataagtgaaaaggaaatc

SEQ ID NO: 10872 - RNA, 20 nt, synthetic construct
  source 1..20: mol_type = other RNA
ctgatgctcatttcatcctt

SEQ ID NO: 10873 - RNA, 20 nt, synthetic construct
  source 1..20: mol_type = other RNA
gatgctcatttcatcctttt

SEQ ID NO: 10874 - RNA, 20 nt, synthetic construct
  source 1..20: mol_type = other RNA
tttcatccttttaacttact

SEQ ID NO: 10875 - RNA, 20 nt, synthetic construct
  source 1..20: mol_type = other RNA
tccaaagcattcatactcca

SEQ ID NO: 10876 - RNA, 20 nt, synthetic construct
  source 1..20: mol_type = other RNA
aaagcattcatactccaggg

SEQ ID NO: 10877 - RNA, 20 nt, synthetic construct
  source 1..20: mol_type = other RNA
agggtctcgtcatttaggtc

SEQ ID NO: 10878 - RNA, 20 nt, synthetic construct
  source 1..20: mol_type = other RNA
tcatttaggtcaaattcttc

SEQ ID NO: 10879 - RNA, 20 nt, synthetic construct
  source 1..20: mol_type = other RNA
agaacccagagatcagacaa

SEQ ID NO: 10880 - RNA, 20 nt, synthetic construct
  source 1..20: mol_type = other RNA
gggttctagagggtgtggaa

SEQ ID NO: 10881 - RNA, 20 nt, synthetic construct
  source 1..20: mol_type = other RNA
tcatccttagcattgatctc

SEQ ID NO: 10882 - RNA, 20 nt, synthetic construct
  source 1..20: mol_type = other RNA
tccttagcattgatctcaat

SEQ ID NO: 10883 - RNA, 20 nt, synthetic construct
  source 1..20: mol_type = other RNA
ctttctgccctcccctgctc

SEQ ID NO: 10884 - RNA, 20 nt, synthetic construct
  source 1..20: mol_type = other RNA
ggaaactcttaccgcctgtc

SEQ ID NO: 10885 - RNA, 20 nt, synthetic construct
  source 1..20: mol_type = other RNA
taccgcctgtccttaatgaa

SEQ ID NO: 10886 - RNA, 20 nt, synthetic construct
  source 1..20: mol_type = other RNA
cagaaaactatgaacttgtc

SEQ ID NO: 10887 - RNA, 20 nt, synthetic construct
  source 1..20: mol_type = other RNA
accgccctgatccacacttc

SEQ ID NO: 10888 - RNA, 20 nt, synthetic construct
  source 1..20: mol_type = other RNA
ccaagattcttcttctgaag

SEQ ID NO: 10889 - RNA, 20 nt, synthetic construct
  source 1..20: mol_type = other RNA
atgtttagcatccagggaaa

SEQ ID NO: 10890 - RNA, 20 nt, synthetic construct
  source 1..20: mol_type = other RNA
attaaatatgatgaacaaat

SEQ ID NO: 10891 - RNA, 20 nt, synthetic construct
  source 1..20: mol_type = other RNA
ttaggtgaattaccaagacg

SEQ ID NO: 10892 - RNA, 20 nt, synthetic construct
  source 1..20: mol_type = other RNA
aaagaaaaaaaaaaggaaaa

SEQ ID NO: 10893 - RNA, 20 nt, synthetic construct
  source 1..20: mol_type = other RNA
ttttccttttttttttcttt

SEQ ID NO: 10894 - RNA, 20 nt, synthetic construct
  source 1..20: mol_type = other RNA
atggagaaaataaaacagca

SEQ ID NO: 10895 - RNA, 20 nt, synthetic construct
  source 1..20: mol_type = other RNA
tctaacaaattggtccaaag

SEQ ID NO: 10896 - RNA, 20 nt, synthetic construct
  source 1..20: mol_type = other RNA
aacaaattggtccaaagaaa

SEQ ID NO: 10897 - RNA, 20 nt, synthetic construct
  source 1..20: mol_type = other RNA
gacaagaagtcactcctaga

SEQ ID NO: 10898 - RNA, 20 nt, synthetic construct
  source 1..20: mol_type = other RNA
tagattgagagccatgaaag

SEQ ID NO: 10899 - RNA, 20 nt, synthetic construct
  source 1..20: mol_type = other RNA
atctaggagtgacttcttgt

SEQ ID NO: 10900 - RNA, 20 nt, synthetic construct
  source 1..20: mol_type = other RNA
caatctaggagtgacttctt

SEQ ID NO: 10901 - RNA, 20 nt, synthetic construct
  source 1..20: mol_type = other RNA
tatctgattaggaaataaca

SEQ ID NO: 10902 - RNA, 20 nt, synthetic construct
  source 1..20: mol_type = other RNA
tcaattatcataatacctaa

SEQ ID NO: 10903 - RNA, 20 nt, synthetic construct
  source 1..20: mol_type = other RNA
ttctggaagtagaaagcaaa

SEQ ID NO: 10904 - RNA, 20 nt, synthetic construct
  source 1..20: mol_type = other RNA
ctgtcaacagatctataagt

SEQ ID NO: 10905 - RNA, 20 nt, synthetic construct
  source 1..20: mol_type = other RNA
ccctgtcaacagatctataa

SEQ ID NO: 10906 - RNA, 20 nt, synthetic construct
  source 1..20: mol_type = other RNA
ctccctgtcaacagatctat

SEQ ID NO: 10907 - RNA, 20 nt, synthetic construct
  source 1..20: mol_type = other RNA
taacaaatgcaaaatttaca

SEQ ID NO: 10908 - RNA, 20 nt, synthetic construct
  source 1..20: mol_type = other RNA
cctgtgaggacagtctttac

SEQ ID NO: 10909 - RNA, 20 nt, synthetic construct
  source 1..20: mol_type = other RNA
caggtgagtgaagatatcac

SEQ ID NO: 10910 - RNA, 20 nt, synthetic construct
  source 1..20: mol_type = other RNA
gatcagaagatctgtaaaga

SEQ ID NO: 10911 - RNA, 20 nt, synthetic construct
  source 1..20: mol_type = other RNA
ccccattttctgttggaatg

SEQ ID NO: 10912 - RNA, 20 nt, synthetic construct
  source 1..20: mol_type = other RNA
ccattttctgttggaatgaa

SEQ ID NO: 10913 - RNA, 20 nt, synthetic construct
  source 1..20: mol_type = other RNA
tgaacttatgagtatacaga

SEQ ID NO: 10914 - RNA, 20 nt, synthetic construct
  source 1..20: mol_type = other RNA
taagttcaggaggcatcact

SEQ ID NO: 10915 - RNA, 20 nt, synthetic construct
  source 1..20: mol_type = other RNA
gccaaaaagtacaaaaatta

SEQ ID NO: 10916 - RNA, 20 nt, synthetic construct
  source 1..20: mol_type = other RNA
ggaggctgaggtgcaagaat

SEQ ID NO: 10917 - RNA, 20 nt, synthetic construct
  source 1..20: mol_type = other RNA
cgagtagctgggatcacagg

SEQ ID NO: 10918 - RNA, 20 nt, synthetic construct
  source 1..20: mol_type = other RNA
gcctcccgagtagctgggat

SEQ ID NO: 10919 - RNA, 20 nt, synthetic construct
  source 1..20: mol_type = other RNA
tgtacctggaaggtagaggt

SEQ ID NO: 10920 - RNA, 20 nt, synthetic construct
  source 1..20: mol_type = other RNA
aactctaattatagtatgag

SEQ ID NO: 10921 - RNA, 20 nt, synthetic construct
  source 1..20: mol_type = other RNA
ctcaaactctaattatagta

SEQ ID NO: 10922 - RNA, 20 nt, synthetic construct
  source 1..20: mol_type = other RNA
aactccctcaaactctaatt

SEQ ID NO: 10923 - RNA, 20 nt, synthetic construct
  source 1..20: mol_type = other RNA
aggtagtaaaagttgtactt

SEQ ID NO: 10924 - RNA, 20 nt, synthetic construct
  source 1..20: mol_type = other RNA
ttgatcagatggatgaatac

SEQ ID NO: 10925 - RNA, 20 nt, synthetic construct
  source 1..20: mol_type = other RNA
cacataaagttctttattcc

SEQ ID NO: 10926 - RNA, 20 nt, synthetic construct
  source 1..20: mol_type = other RNA
cataaagttctttattccac

SEQ ID NO: 10927 - RNA, 20 nt, synthetic construct
  source 1..20: mol_type = other RNA
ttcatgttccctttctacca

SEQ ID NO: 10928 - RNA, 20 nt, synthetic construct
  source 1..20: mol_type = other RNA
tcttaattattttgaatatt

SEQ ID NO: 10929 - RNA, 20 nt, synthetic construct
  source 1..20: mol_type = other RNA
acattctaatgatttgaaac

SEQ ID NO: 10930 - RNA, 20 nt, synthetic construct
  source 1..20: mol_type = other RNA
agagttactgggtgaaatac

SEQ ID NO: 10931 - RNA, 20 nt, synthetic construct
  source 1..20: mol_type = other RNA
tgagatttaaagatgttaaa

SEQ ID NO: 10932 - RNA, 20 nt, synthetic construct
  source 1..20: mol_type = other RNA
ggtacatagtactgcagctt

SEQ ID NO: 10933 - RNA, 20 nt, synthetic construct
  source 1..20: mol_type = other RNA
ttggacatttaatggaaagc

SEQ ID NO: 10934 - RNA, 20 nt, synthetic construct
  source 1..20: mol_type = other RNA
ctttggacatttaatggaaa

SEQ ID NO: 10935 - RNA, 20 nt, synthetic construct
  source 1..20: mol_type = other RNA
acaggaaataagcgtagccc

SEQ ID NO: 10936 - RNA, 20 nt, synthetic construct
  source 1..20: mol_type = other RNA
caaaaccactgaccatatta

SEQ ID NO: 10937 - RNA, 20 nt, synthetic construct
  source 1..20: mol_type = other RNA
aaaccactgaccatattatt

SEQ ID NO: 10938 - RNA, 20 nt, synthetic construct
  source 1..20: mol_type = other RNA
tggtagaccctatatatttc

SEQ ID NO: 10939 - RNA, 20 nt, synthetic construct
  source 1..20: mol_type = other RNA
aaagttgtttttaaattata

SEQ ID NO: 10940 - RNA, 20 nt, synthetic construct
  source 1..20: mol_type = other RNA
tgaaatgtgtaaagacatgt

SEQ ID NO: 10941 - RNA, 20 nt, synthetic construct
  source 1..20: mol_type = other RNA
gggagcccaggttgcatata

SEQ ID NO: 10942 - RNA, 20 nt, synthetic construct
  source 1..20: mol_type = other RNA
ctgaggtgatttcttttttc

SEQ ID NO: 10943 - RNA, 20 nt, synthetic construct
  source 1..20: mol_type = other RNA
gccccacaaaccctgaactg

SEQ ID NO: 10944 - RNA, 20 nt, synthetic construct
  source 1..20: mol_type = other RNA
tttccagtaccttcccccag

SEQ ID NO: 10945 - RNA, 20 nt, synthetic construct
  source 1..20: mol_type = other RNA
cttttccagtaccttccccc

SEQ ID NO: 10946 - RNA, 20 nt, synthetic construct
  source 1..20: mol_type = other RNA
gctgtttctattcctctctt

SEQ ID NO: 10947 - RNA, 20 nt, synthetic construct
  source 1..20: mol_type = other RNA
tctgctgtttctattcctct

SEQ ID NO: 10948 - RNA, 20 nt, synthetic construct
  source 1..20: mol_type = other RNA
gcagatgctgatataattat

SEQ ID NO: 10949 - RNA, 20 nt, synthetic construct
  source 1..20: mol_type = other RNA
tattgtaattccttttagag

SEQ ID NO: 10950 - RNA, 20 nt, synthetic construct
  source 1..20: mol_type = other RNA
aaaaggaattacaatatgag

SEQ ID NO: 10951 - RNA, 20 nt, synthetic construct
  source 1..20: mol_type = other RNA
attatgctgatataattttt

SEQ ID NO: 10952 - RNA, 20 nt, synthetic construct
  source 1..20: mol_type = other RNA
gtaaaaagtagcattccaac

SEQ ID NO: 10953 - RNA, 20 nt, synthetic construct
  source 1..20: mol_type = other RNA
ccctctttaattaaaaggat

SEQ ID NO: 10954 - RNA, 20 nt, synthetic construct
  source 1..20: mol_type = other RNA
ctctttaattaaaaggatac

SEQ ID NO: 10955 - RNA, 20 nt, synthetic construct
  source 1..20: mol_type = other RNA
ttaattaaaaggatactatt

SEQ ID NO: 10956 - RNA, 20 nt, synthetic construct
  source 1..20: mol_type = other RNA
aatatactgaatatattatg

SEQ ID NO: 10957 - RNA, 20 nt, synthetic construct
  source 1..20: mol_type = other RNA
ttggtaagagcagggtcagg

SEQ ID NO: 10958 - RNA, 20 nt, synthetic construct
  source 1..20: mol_type = other RNA
taccaaggagtttgatgtag

SEQ ID NO: 10959 - RNA, 20 nt, synthetic construct
  source 1..20: mol_type = other RNA
ttaaactaaatcaacagttg

SEQ ID NO: 10960 - RNA, 20 nt, synthetic construct
  source 1..20: mol_type = other RNA
tctactttcatttcaactgt

SEQ ID NO: 10961 - RNA, 20 nt, synthetic construct
  source 1..20: mol_type = other RNA
aattcctcaaacatacttaa

SEQ ID NO: 10962 - RNA, 20 nt, synthetic construct
  source 1..20: mol_type = other RNA
aacatacttaagtcaggtct

SEQ ID NO: 10963 - RNA, 20 nt, synthetic construct
  source 1..20: mol_type = other RNA
gtaatgcaaggttagcattg

SEQ ID NO: 10964 - RNA, 20 nt, synthetic construct
  source 1..20: mol_type = other RNA
tttctgtgtatccttcctaa

SEQ ID NO: 10965 - RNA, 20 nt, synthetic construct
  source 1..20: mol_type = other RNA
gagtgaaacacttagggaat

SEQ ID NO: 10966 - RNA, 20 nt, synthetic construct
  source 1..20: mol_type = other RNA
gaggttggctatcctctttt

SEQ ID NO: 10967 - RNA, 20 nt, synthetic construct
  source 1..20: mol_type = other RNA
taagcccccttaaatgcctc

SEQ ID NO: 10968 - RNA, 20 nt, synthetic construct
  source 1..20: mol_type = other RNA
gtgcctggtgtcgtgctggt

SEQ ID NO: 10969 - RNA, 20 nt, synthetic construct
  source 1..20: mol_type = other RNA
atggccattgtcctcagtgc

SEQ ID NO: 10970 - RNA, 20 nt, synthetic construct
  source 1..20: mol_type = other RNA
ctattcttttcttactgtcc

SEQ ID NO: 10971 - RNA, 20 nt, synthetic construct
  source 1..20: mol_type = other RNA
tttcagaagtaatgctattt

SEQ ID NO: 10972 - RNA, 20 nt, synthetic construct
  source 1..20: mol_type = other RNA
ttcttccttgaaggttttgg

SEQ ID NO: 10973 - RNA, 20 nt, synthetic construct
  source 1..20: mol_type = other RNA
ccattgtactgaatggtgtt

SEQ ID NO: 10974 - RNA, 20 nt, synthetic construct
  source 1..20: mol_type = other RNA
ttagcaaaatctgttttagg

SEQ ID NO: 10975 - RNA, 20 nt, synthetic construct
  source 1..20: mol_type = other RNA
acttaaagttgcctcattag

SEQ ID NO: 10976 - RNA, 20 nt, synthetic construct
  source 1..20: mol_type = other RNA
taggattccacaaaatactg

SEQ ID NO: 10977 - RNA, 20 nt, synthetic construct
  source 1..20: mol_type = other RNA
attaactctggttttcatga

SEQ ID NO: 10978 - RNA, 20 nt, synthetic construct
  source 1..20: mol_type = other RNA
tgaaaaccagagttaattga

SEQ ID NO: 10979 - RNA, 20 nt, synthetic construct
  source 1..20: mol_type = other RNA
aaatctaactaactttgttc

SEQ ID NO: 10980 - RNA, 20 nt, synthetic construct
  source 1..20: mol_type = other RNA
gcctcttcttcctacctcca

SEQ ID NO: 10981 - RNA, 20 nt, synthetic construct
  source 1..20: mol_type = other RNA
tcttcctacctccaagagta

SEQ ID NO: 10982 - RNA, 20 nt, synthetic construct
  source 1..20: mol_type = other RNA
ttgagtggtatttatactct

SEQ ID NO: 10983 - RNA, 20 nt, synthetic construct
  source 1..20: mol_type = other RNA
ttgtaatgttgaccctcctt

SEQ ID NO: 10984 - RNA, 20 nt, synthetic construct
  source 1..20: mol_type = other RNA
cagatggaagacaaactcca

SEQ ID NO: 10985 - RNA, 20 nt, synthetic construct
  source 1..20: mol_type = other RNA
aagttaacaaaatcttttgg

SEQ ID NO: 10986 - RNA, 20 nt, synthetic construct
  source 1..20: mol_type = other RNA
agctggcagtgccgccatca

SEQ ID NO: 10987 - RNA, 20 nt, synthetic construct
  source 1..20: mol_type = other RNA
gaaaaggaagtcatctaaca

SEQ ID NO: 10988 - RNA, 20 nt, synthetic construct
  source 1..20: mol_type = other RNA
ttaaaccattgttagatgac

SEQ ID NO: 10989 - RNA, 20 nt, synthetic construct
  source 1..20: mol_type = other RNA
attccaggttcatcactcat

SEQ ID NO: 10990 - RNA, 20 nt, synthetic construct
  source 1..20: mol_type = other RNA
tttcactgtattgtaagccc

SEQ ID NO: 10991 - RNA, 20 nt, synthetic construct
  source 1..20: mol_type = other RNA
ctctggttaagaatcactct

SEQ ID NO: 10992 - RNA, 20 nt, synthetic construct
  source 1..20: mol_type = other RNA
ctggttaagaatcactcttt

SEQ ID NO: 10993 - RNA, 20 nt, synthetic construct
  source 1..20: mol_type = other RNA
ggttaagaatcactcttttc

SEQ ID NO: 10994 - RNA, 20 nt, synthetic construct
  source 1..20: mol_type = other RNA
tttctatgtatccccagtag

SEQ ID NO: 10995 - RNA, 20 nt, synthetic construct
  source 1..20: mol_type = other RNA
tttataacacaaaccaagct

SEQ ID NO: 10996 - RNA, 20 nt, synthetic construct
  source 1..20: mol_type = other RNA
cttttataacacaaaccaag

SEQ ID NO: 10997 - RNA, 20 nt, synthetic construct
  source 1..20: mol_type = other RNA
ctcttttataacacaaacca

SEQ ID NO: 10998 - RNA, 20 nt, synthetic construct
  source 1..20: mol_type = other RNA
tagggtacacatgtaatttg

SEQ ID NO: 10999 - RNA, 20 nt, synthetic construct
  source 1..20: mol_type = other RNA
tatgtaccccaccactggag

SEQ ID NO: 11000 - RNA, 20 nt, synthetic construct
  source 1..20: mol_type = other RNA
agtggtggggtacatatgag

SEQ ID NO: 11001 - RNA, 20 nt, synthetic construct
  source 1..20: mol_type = other RNA
tcagatgagaatcaccctta

SEQ ID NO: 11002 - RNA, 20 nt, synthetic construct
  source 1..20: mol_type = other RNA
tctgaagaggcagcccctaa

SEQ ID NO: 11003 - RNA, 20 nt, synthetic construct
  source 1..20: mol_type = other RNA
gttattgccagtactgtgtg

SEQ ID NO: 11004 - RNA, 20 nt, synthetic construct
  source 1..20: mol_type = other RNA
atcttatcacatggcagatt

SEQ ID NO: 11005 - RNA, 20 nt, synthetic construct
  source 1..20: mol_type = other RNA
gtggggcagaaaaggaaatg

SEQ ID NO: 11006 - RNA, 20 nt, synthetic construct
  source 1..20: mol_type = other RNA
tcaagacccttctttcactc

SEQ ID NO: 11007 - RNA, 20 nt, synthetic construct
  source 1..20: mol_type = other RNA
cattcagctgtacgattagg

SEQ ID NO: 11008 - RNA, 20 nt, synthetic construct
  source 1..20: mol_type = other RNA
tcttcaagcatcgtagctgg

SEQ ID NO: 11009 - RNA, 20 nt, synthetic construct
  source 1..20: mol_type = other RNA
atttctgaagctaagaagga

SEQ ID NO: 11010 - RNA, 20 nt, synthetic construct
  source 1..20: mol_type = other RNA
cctggccttaatgatagttt

SEQ ID NO: 11011 - RNA, 20 nt, synthetic construct
  source 1..20: mol_type = other RNA
catctgtaatcccagcactt

SEQ ID NO: 11012 - RNA, 20 nt, synthetic construct
  source 1..20: mol_type = other RNA
caaagtgctgggattacaga

SEQ ID NO: 11013 - RNA, 20 nt, synthetic construct
  source 1..20: mol_type = other RNA
gcctcccaaagtgctgggat

SEQ ID NO: 11014 - RNA, 20 nt, synthetic construct
  source 1..20: mol_type = other RNA
tgatccgcccacctcagcct

SEQ ID NO: 11015 - RNA, 20 nt, synthetic construct
  source 1..20: mol_type = other RNA
tgcctcagcctcccgagtag

SEQ ID NO: 11016 - RNA, 20 nt, synthetic construct
  source 1..20: mol_type = other RNA
gcttcctgggttcaagcaat

SEQ ID NO: 11017 - RNA, 20 nt, synthetic construct
  source 1..20: mol_type = other RNA
ctgcaacctctgcttcctgg

SEQ ID NO: 11018 - RNA, 20 nt, synthetic construct
  source 1..20: mol_type = other RNA
gctcactgcaacctctgctt

SEQ ID NO: 11019 - RNA, 20 nt, synthetic construct
  source 1..20: mol_type = other RNA
agactgggcaaaagagcaag

SEQ ID NO: 11020 - RNA, 20 nt, synthetic construct
  source 1..20: mol_type = other RNA
tgtttttgacagacacttac

SEQ ID NO: 11021 - RNA, 20 nt, synthetic construct
  source 1..20: mol_type = other RNA
ttcccagcacctaagtctaa

SEQ ID NO: 11022 - RNA, 20 nt, synthetic construct
  source 1..20: mol_type = other RNA
aaagaagcaaatctctttcc

SEQ ID NO: 11023 - RNA, 20 nt, synthetic construct
  source 1..20: mol_type = other RNA
gaattaatttctgaggttcc

SEQ ID NO: 11024 - RNA, 20 nt, synthetic construct
  source 1..20: mol_type = other RNA
tggtcttgacgttctttacc

SEQ ID NO: 11025 - RNA, 20 nt, synthetic construct
  source 1..20: mol_type = other RNA
tcacaaagaatttgcttcag

SEQ ID NO: 11026 - RNA, 20 nt, synthetic construct
  source 1..20: mol_type = other RNA
gctcttcacaaagaatttgc

SEQ ID NO: 11027 - RNA, 20 nt, synthetic construct
  source 1..20: mol_type = other RNA
tgatctgaactaaaatttac

SEQ ID NO: 11028 - RNA, 20 nt, synthetic construct
  source 1..20: mol_type = other RNA
gtgtaaattttagttcagat

SEQ ID NO: 11029 - RNA, 20 nt, synthetic construct
  source 1..20: mol_type = other RNA
tattttaattacactgatac

SEQ ID NO: 11030 - RNA, 20 nt, synthetic construct
  source 1..20: mol_type = other RNA
attcattaatgactggttat

SEQ ID NO: 11031 - RNA, 20 nt, synthetic construct
  source 1..20: mol_type = other RNA
cccctacatattagtcattt

SEQ ID NO: 11032 - RNA, 20 nt, synthetic construct
  source 1..20: mol_type = other RNA
cctacatattagtcatttac

SEQ ID NO: 11033 - RNA, 20 nt, synthetic construct
  source 1..20: mol_type = other RNA
aatcaaaatactccatacac

SEQ ID NO: 11034 - RNA, 20 nt, synthetic construct
  source 1..20: mol_type = other RNA
atacactgagataacagtct

SEQ ID NO: 11035 - RNA, 20 nt, synthetic construct
  source 1..20: mol_type = other RNA
gtgtatggagtattttgatt

SEQ ID NO: 11036 - RNA, 20 nt, synthetic construct
  source 1..20: mol_type = other RNA
tattagtaactgaaaccttt

SEQ ID NO: 11037 - RNA, 20 nt, synthetic construct
  source 1..20: mol_type = other RNA
cttgttttatgaatttgttc

SEQ ID NO: 11038 - RNA, 20 nt, synthetic construct
  source 1..20: mol_type = other RNA
aattccatattttagcaaga

SEQ ID NO: 11039 - RNA, 20 nt, synthetic construct
  source 1..20: mol_type = other RNA
ttacaccgttatttctgtta

SEQ ID NO: 11040 - RNA, 20 nt, synthetic construct
  source 1..20: mol_type = other RNA
ctttacaccgttatttctgt

SEQ ID NO: 11041 - RNA, 20 nt, synthetic construct
  source 1..20: mol_type = other RNA
ttaggccagtctgaggatta

SEQ ID NO: 11042 - RNA, 20 nt, synthetic construct
  source 1..20: mol_type = other RNA
gactggcctaatgagtttgg

SEQ ID NO: 11043 - RNA, 20 nt, synthetic construct
  source 1..20: mol_type = other RNA
gtatattagaaagtgcatga

SEQ ID NO: 11044 - RNA, 20 nt, synthetic construct
  source 1..20: mol_type = other RNA
gttttagatataatatgtat

SEQ ID NO: 11045 - RNA, 20 nt, synthetic construct
  source 1..20: mol_type = other RNA
ggtttctttgatccattctt

SEQ ID NO: 11046 - RNA, 20 nt, synthetic construct
  source 1..20: mol_type = other RNA
taacacttcttttgatattt

SEQ ID NO: 11047 - RNA, 20 nt, synthetic construct
  source 1..20: mol_type = other RNA
tcgattcactgattttttga

SEQ ID NO: 11048 - RNA, 20 nt, synthetic construct
  source 1..20: mol_type = other RNA
attcactgattttttgaagg

SEQ ID NO: 11049 - RNA, 20 nt, synthetic construct
  source 1..20: mol_type = other RNA
atcttcttcagttctgctct

SEQ ID NO: 11050 - RNA, 20 nt, synthetic construct
  source 1..20: mol_type = other RNA
gatcttagttattttttgcc

SEQ ID NO: 11051 - RNA, 20 nt, synthetic construct
  source 1..20: mol_type = other RNA
tgcttctctagttcttttaa

SEQ ID NO: 11052 - RNA, 20 nt, synthetic construct
  source 1..20: mol_type = other RNA
agttcttttaattgtgatgt

SEQ ID NO: 11053 - RNA, 20 nt, synthetic construct
  source 1..20: mol_type = other RNA
tgtgggcatttagtgctata

SEQ ID NO: 11054 - RNA, 20 nt, synthetic construct
  source 1..20: mol_type = other RNA
aaacattgctttagctgtgt

SEQ ID NO: 11055 - RNA, 20 nt, synthetic construct
  source 1..20: mol_type = other RNA
gggacacagctaaagcaatg

SEQ ID NO: 11056 - RNA, 20 nt, synthetic construct
  source 1..20: mol_type = other RNA
ttggtttcaaataacttatt

SEQ ID NO: 11057 - RNA, 20 nt, synthetic construct
  source 1..20: mol_type = other RNA
tgaatgactactgggtaaat

SEQ ID NO: 11058 - RNA, 20 nt, synthetic construct
  source 1..20: mol_type = other RNA
aaatcgcacaactacatgga

SEQ ID NO: 11059 - RNA, 20 nt, synthetic construct
  source 1..20: mol_type = other RNA
aaaattgaccacataattgg

SEQ ID NO: 11060 - RNA, 20 nt, synthetic construct
  source 1..20: mol_type = other RNA
accccaaatcaacagaatat

SEQ ID NO: 11061 - RNA, 20 nt, synthetic construct
  source 1..20: mol_type = other RNA
ccaccccaaatcaacagaat

SEQ ID NO: 11062 - RNA, 20 nt, synthetic construct
  source 1..20: mol_type = other RNA
ggaccaagcagacctaatag

SEQ ID NO: 11063 - RNA, 20 nt, synthetic construct
  source 1..20: mol_type = other RNA
gctctggaccaagcagacct

SEQ ID NO: 11064 - RNA, 20 nt, synthetic construct
  source 1..20: mol_type = other RNA
caagactaaaccaagaagaa

SEQ ID NO: 11065 - RNA, 20 nt, synthetic construct
  source 1..20: mol_type = other RNA
atttcagaacttgttattgg

SEQ ID NO: 11066 - RNA, 20 nt, synthetic construct
  source 1..20: mol_type = other RNA
ggtagaattcagctgtgaat

SEQ ID NO: 11067 - RNA, 20 nt, synthetic construct
  source 1..20: mol_type = other RNA
ttgtacctctggtagaattc

SEQ ID NO: 11068 - RNA, 20 nt, synthetic construct
  source 1..20: mol_type = other RNA
tctttgtacctctggtagaa

SEQ ID NO: 11069 - RNA, 20 nt, synthetic construct
  source 1..20: mol_type = other RNA
ttttctgttgcttggaatag

SEQ ID NO: 11070 - RNA, 20 nt, synthetic construct
  source 1..20: mol_type = other RNA
ctaactcattttatgaggac

SEQ ID NO: 11071 - RNA, 20 nt, synthetic construct
  source 1..20: mol_type = other RNA
ttttatgaggacagcatctt

SEQ ID NO: 11072 - RNA, 20 nt, synthetic construct
  source 1..20: mol_type = other RNA
ctcatcactcttatttaaca

SEQ ID NO: 11073 - RNA, 20 nt, synthetic construct
  source 1..20: mol_type = other RNA
catcactcttatttaacata

SEQ ID NO: 11074 - RNA, 20 nt, synthetic construct
  source 1..20: mol_type = other RNA
tcactcttatttaacatagt

SEQ ID NO: 11075 - RNA, 20 nt, synthetic construct
  source 1..20: mol_type = other RNA
tatttaacatagtattggaa

SEQ ID NO: 11076 - RNA, 20 nt, synthetic construct
  source 1..20: mol_type = other RNA
tgcctgattgccctggccag

SEQ ID NO: 11077 - RNA, 20 nt, synthetic construct
  source 1..20: mol_type = other RNA
gtttgcagatgacatgattg

SEQ ID NO: 11078 - RNA, 20 nt, synthetic construct
  source 1..20: mol_type = other RNA
caggccaaaatctccttaag

SEQ ID NO: 11079 - RNA, 20 nt, synthetic construct
  source 1..20: mol_type = other RNA
ggccaaaatctccttaagca

SEQ ID NO: 11080 - RNA, 20 nt, synthetic construct
  source 1..20: mol_type = other RNA
ttaagcaacttcagcaaagt

SEQ ID NO: 11081 - RNA, 20 nt, synthetic construct
  source 1..20: mol_type = other RNA
ggatacaaaatcaatgtgca

SEQ ID NO: 11082 - RNA, 20 nt, synthetic construct
  source 1..20: mol_type = other RNA
tgatttgtctattattcgtg

SEQ ID NO: 11083 - RNA, 20 nt, synthetic construct
  source 1..20: mol_type = other RNA
cattcacaattactacaaag

SEQ ID NO: 11084 - RNA, 20 nt, synthetic construct
  source 1..20: mol_type = other RNA
ttgtagtaattgtgaatggg

SEQ ID NO: 11085 - RNA, 20 nt, synthetic construct
  source 1..20: mol_type = other RNA
acatgccttgtaagttgtat

SEQ ID NO: 11086 - RNA, 20 nt, synthetic construct
  source 1..20: mol_type = other RNA
ttgaagaagtcctccacatg

SEQ ID NO: 11087 - RNA, 20 nt, synthetic construct
  source 1..20: mol_type = other RNA
aggaaataagagaggacaca

SEQ ID NO: 11088 - RNA, 20 nt, synthetic construct
  source 1..20: mol_type = other RNA
tatttccttgagcagtggtt

SEQ ID NO: 11089 - RNA, 20 nt, synthetic construct
  source 1..20: mol_type = other RNA
cttatttccttgagcagtgg

SEQ ID NO: 11090 - RNA, 20 nt, synthetic construct
  source 1..20: mol_type = other RNA
tgcccaggaagaatcaatgt

SEQ ID NO: 11091 - RNA, 20 nt, synthetic construct
  source 1..20: mol_type = other RNA
aattctgtgaagaaagtcag

SEQ ID NO: 11092 - RNA, 20 nt, synthetic construct
  source 1..20: mol_type = other RNA
agctttgttctttttgctta

SEQ ID NO: 11093 - RNA, 20 nt, synthetic construct
  source 1..20: mol_type = other RNA
aatctttgttatttctttcc

SEQ ID NO: 11094 - RNA, 20 nt, synthetic construct
  source 1..20: mol_type = other RNA
ttgaatgaaaagatgaacaa

SEQ ID NO: 11095 - RNA, 20 nt, synthetic construct
  source 1..20: mol_type = other RNA
cttttttgtgttagtctacc

SEQ ID NO: 11096 - RNA, 20 nt, synthetic construct
  source 1..20: mol_type = other RNA
gaaatgaaagtgggtacata

SEQ ID NO: 11097 - RNA, 20 nt, synthetic construct
  source 1..20: mol_type = other RNA
caacaaagaaaagccctgga

SEQ ID NO: 11098 - RNA, 20 nt, synthetic construct
  source 1..20: mol_type = other RNA
ggctgaaaccttcaatacta

SEQ ID NO: 11099 - RNA, 20 nt, synthetic construct
  source 1..20: mol_type = other RNA
cttttcaatttggatgtctt

SEQ ID NO: 11100 - RNA, 20 nt, synthetic construct
  source 1..20: mol_type = other RNA
tgcctcagcctcccgagtag

SEQ ID NO: 11101 - RNA, 20 nt, synthetic construct
  source 1..20: mol_type = other RNA
gcttcccggcttcccgggtt

SEQ ID NO: 11102 - RNA, 20 nt, synthetic construct
  source 1..20: mol_type = other RNA
ctgcaagctccgcttcccgg

SEQ ID NO: 11103 - RNA, 20 nt, synthetic construct
  source 1..20: mol_type = other RNA
gctcactgcaagctccgctt

SEQ ID NO: 11104 - RNA, 20 nt, synthetic construct
  source 1..20: mol_type = other RNA
gtcgcccaggccggactgcg

SEQ ID NO: 11105 - RNA, 20 nt, synthetic construct
  source 1..20: mol_type = other RNA
ctctgtcgcccaggccggac

SEQ ID NO: 11106 - RNA, 20 nt, synthetic construct
  source 1..20: mol_type = other RNA
gtctcaaaaaaaaaaaaaaa

SEQ ID NO: 11107 - RNA, 20 nt, synthetic construct
  source 1..20: mol_type = other RNA
aaaaaaaaaaaaaaaaaaaa

SEQ ID NO: 11108 - RNA, 20 nt, synthetic construct
  source 1..20: mol_type = other RNA
ttagttacctgtgttttttg

SEQ ID NO: 11109 - RNA, 20 nt, synthetic construct
  source 1..20: mol_type = other RNA
aagtcaaaagtcaatcacca

SEQ ID NO: 11110 - RNA, 20 nt, synthetic construct
  source 1..20: mol_type = other RNA
gtataaggttagcttttcca

SEQ ID NO: 11111 - RNA, 20 nt, synthetic construct
  source 1..20: mol_type = other RNA
gattgactcctctcataata

SEQ ID NO: 11112 - RNA, 20 nt, synthetic construct
  source 1..20: mol_type = other RNA
tctcataatactagttggag

SEQ ID NO: 11113 - RNA, 20 nt, synthetic construct
  source 1..20: mol_type = other RNA
cataatactagttggagacc

SEQ ID NO: 11114 - RNA, 20 nt, synthetic construct
  source 1..20: mol_type = other RNA
taatactagttggagaccag

SEQ ID NO: 11115 - RNA, 20 nt, synthetic construct
  source 1..20: mol_type = other RNA
aactagtattatgagaggag

SEQ ID NO: 11116 - RNA, 20 nt, synthetic construct
  source 1..20: mol_type = other RNA
ggtctccaactagtattatg

SEQ ID NO: 11117 - RNA, 20 nt, synthetic construct
  source 1..20: mol_type = other RNA
ctggtctccaactagtatta

SEQ ID NO: 11118 - RNA, 20 nt, synthetic construct
  source 1..20: mol_type = other RNA
gctgcctctctggtctccaa

SEQ ID NO: 11119 - RNA, 20 nt, synthetic construct
  source 1..20: mol_type = other RNA
cggctcagctgcctctctgg

SEQ ID NO: 11120 - RNA, 20 nt, synthetic construct
  source 1..20: mol_type = other RNA
tagtcagacagacacatcag

SEQ ID NO: 11121 - RNA, 20 nt, synthetic construct
  source 1..20: mol_type = other RNA
acatgttgattcatgtctgt

SEQ ID NO: 11122 - RNA, 20 nt, synthetic construct
  source 1..20: mol_type = other RNA
tttggtcctgttgttttgtg

SEQ ID NO: 11123 - RNA, 20 nt, synthetic construct
  source 1..20: mol_type = other RNA
gcacttggtgatccgagcag

SEQ ID NO: 11124 - RNA, 20 nt, synthetic construct
  source 1..20: mol_type = other RNA
gatcaccaagtgctgaggta

SEQ ID NO: 11125 - RNA, 20 nt, synthetic construct
  source 1..20: mol_type = other RNA
gttcaccaagcaaaagccaa

SEQ ID NO: 11126 - RNA, 20 nt, synthetic construct
  source 1..20: mol_type = other RNA
gcaaccagggtggaccttct

SEQ ID NO: 11127 - RNA, 20 nt, synthetic construct
  source 1..20: mol_type = other RNA
actcagcaaccagggtggac

SEQ ID NO: 11128 - RNA, 20 nt, synthetic construct
  source 1..20: mol_type = other RNA
tcttcttgcttctgccttgc

SEQ ID NO: 11129 - RNA, 20 nt, synthetic construct
  source 1..20: mol_type = other RNA
tgctatagtccaagtaggaa

SEQ ID NO: 11130 - RNA, 20 nt, synthetic construct
  source 1..20: mol_type = other RNA
ttcagggaaaggccaagttt

SEQ ID NO: 11131 - RNA, 20 nt, synthetic construct
  source 1..20: mol_type = other RNA
agcatacccagttgctggct

SEQ ID NO: 11132 - RNA, 20 nt, synthetic construct
  source 1..20: mol_type = other RNA
gaagctgtaggcacgtaaca

SEQ ID NO: 11133 - RNA, 20 nt, synthetic construct
  source 1..20: mol_type = other RNA
tcttgttacgtgcctacagc

SEQ ID NO: 11134 - RNA, 20 nt, synthetic construct
  source 1..20: mol_type = other RNA
cccgcaatcagcgagtcttt

SEQ ID NO: 11135 - RNA, 20 nt, synthetic construct
  source 1..20: mol_type = other RNA
cgcaatcagcgagtctttgg

SEQ ID NO: 11136 - RNA, 20 nt, synthetic construct
  source 1..20: mol_type = other RNA
ctgattgcgggagaggcttt

SEQ ID NO: 11137 - RNA, 20 nt, synthetic construct
  source 1..20: mol_type = other RNA
ttcacttccagagctgcaat

SEQ ID NO: 11138 - RNA, 20 nt, synthetic construct
  source 1..20: mol_type = other RNA
ggaagtgaaggagaaccagt

SEQ ID NO: 11139 - RNA, 20 nt, synthetic construct
  source 1..20: mol_type = other RNA
ataataaaggaagtttttaa

SEQ ID NO: 11140 - RNA, 20 nt, synthetic construct
  source 1..20: mol_type = other RNA
attttagaaatacctcaata

SEQ ID NO: 11141 - RNA, 20 nt, synthetic construct
  source 1..20: mol_type = other RNA
atctctattttagaaatacc

SEQ ID NO: 11142 - RNA, 20 nt, synthetic construct
  source 1..20: mol_type = other RNA
ttaaaatatagctttatttc

SEQ ID NO: 11143 - RNA, 20 nt, synthetic construct
  source 1..20: mol_type = other RNA
gctaagctaaaaactgttga

SEQ ID NO: 11144 - RNA, 20 nt, synthetic construct
  source 1..20: mol_type = other RNA
gtatacacttagtatttatg

SEQ ID NO: 11145 - RNA, 20 nt, synthetic construct
  source 1..20: mol_type = other RNA
tgctcacaagcaagagaaga

SEQ ID NO: 11146 - RNA, 20 nt, synthetic construct
  source 1..20: mol_type = other RNA
caagcaagagaagagggtct

SEQ ID NO: 11147 - RNA, 20 nt, synthetic construct
  source 1..20: mol_type = other RNA
tgcttgtgagcatgagtaaa

SEQ ID NO: 11148 - RNA, 20 nt, synthetic construct
  source 1..20: mol_type = other RNA
tctcttgcttgtgagcatga

SEQ ID NO: 11149 - RNA, 20 nt, synthetic construct
  source 1..20: mol_type = other RNA
catttttgtgactctggcaa

SEQ ID NO: 11150 - RNA, 20 nt, synthetic construct
  source 1..20: mol_type = other RNA
ggcaaacctacacacagaat

SEQ ID NO: 11151 - RNA, 20 nt, synthetic construct
  source 1..20: mol_type = other RNA
ttactgtctctttttaatca

SEQ ID NO: 11152 - RNA, 20 nt, synthetic construct
  source 1..20: mol_type = other RNA
ttttaatcagtacctgaact

SEQ ID NO: 11153 - RNA, 20 nt, synthetic construct
  source 1..20: mol_type = other RNA
gcagttcaggtactgattaa

SEQ ID NO: 11154 - RNA, 20 nt, synthetic construct
  source 1..20: mol_type = other RNA
caacaagatcaagccgtcct

SEQ ID NO: 11155 - RNA, 20 nt, synthetic construct
  source 1..20: mol_type = other RNA
tgaagcaagccacagtagaa

SEQ ID NO: 11156 - RNA, 20 nt, synthetic construct
  source 1..20: mol_type = other RNA
taatacttgttccattcttt

SEQ ID NO: 11157 - RNA, 20 nt, synthetic construct
  source 1..20: mol_type = other RNA
ttctcataatacttgttcca

SEQ ID NO: 11158 - RNA, 20 nt, synthetic construct
  source 1..20: mol_type = other RNA
tattcagaatgtcctgttta

SEQ ID NO: 11159 - RNA, 20 nt, synthetic construct
  source 1..20: mol_type = other RNA
agcagcagggatgatttcct

SEQ ID NO: 11160 - RNA, 20 nt, synthetic construct
  source 1..20: mol_type = other RNA
agttgcaatacaagtaagtg

SEQ ID NO: 11161 - RNA, 20 nt, synthetic construct
  source 1..20: mol_type = other RNA
accctaatagaagacctatc

SEQ ID NO: 11162 - RNA, 20 nt, synthetic construct
  source 1..20: mol_type = other RNA
ccaaagatggtatagaagca

SEQ ID NO: 11163 - RNA, 20 nt, synthetic construct
  source 1..20: mol_type = other RNA
gaataagtctagctgtttct

SEQ ID NO: 11164 - RNA, 20 nt, synthetic construct
  source 1..20: mol_type = other RNA
atcccatcagaagtagacta

SEQ ID NO: 11165 - RNA, 20 nt, synthetic construct
  source 1..20: mol_type = other RNA
ctgcatgacatttacaacca

SEQ ID NO: 11166 - RNA, 20 nt, synthetic construct
  source 1..20: mol_type = other RNA
gcatgacatttacaaccaaa

SEQ ID NO: 11167 - RNA, 20 nt, synthetic construct
  source 1..20: mol_type = other RNA
gctgtttttcagcataggaa

SEQ ID NO: 11168 - RNA, 20 nt, synthetic construct
  source 1..20: mol_type = other RNA
ctcccttatctccttcaggt

SEQ ID NO: 11169 - RNA, 20 nt, synthetic construct
  source 1..20: mol_type = other RNA
cttatctccttcaggtcttt

SEQ ID NO: 11170 - RNA, 20 nt, synthetic construct
  source 1..20: mol_type = other RNA
ttcaggtctttgctagatgt

SEQ ID NO: 11171 - RNA, 20 nt, synthetic construct
  source 1..20: mol_type = other RNA
gccatttacagggctgtcaa

SEQ ID NO: 11172 - RNA, 20 nt, synthetic construct
  source 1..20: mol_type = other RNA
tttcacatcactcagccatt

SEQ ID NO: 11173 - RNA, 20 nt, synthetic construct
  source 1..20: mol_type = other RNA
acagtgtggaacacagaata

SEQ ID NO: 11174 - RNA, 20 nt, synthetic construct
  source 1..20: mol_type = other RNA
gtgccagacctcccctcagg

SEQ ID NO: 11175 - RNA, 20 nt, synthetic construct
  source 1..20: mol_type = other RNA
cctcaggaattccttcaacc

SEQ ID NO: 11176 - RNA, 20 nt, synthetic construct
  source 1..20: mol_type = other RNA
ggaattccttcaaccatcct

SEQ ID NO: 11177 - RNA, 20 nt, synthetic construct
  source 1..20: mol_type = other RNA
gctcatgctttgagctggtg

SEQ ID NO: 11178 - RNA, 20 nt, synthetic construct
  source 1..20: mol_type = other RNA
tgctttgagctggtgtccat

SEQ ID NO: 11179 - RNA, 20 nt, synthetic construct
  source 1..20: mol_type = other RNA
aagcatgagcagaggatggt

SEQ ID NO: 11180 - RNA, 20 nt, synthetic construct
  source 1..20: mol_type = other RNA
gttgcctggtgttcaagcaa

SEQ ID NO: 11181 - RNA, 20 nt, synthetic construct
  source 1..20: mol_type = other RNA
cactcacccttccttccatt

SEQ ID NO: 11182 - RNA, 20 nt, synthetic construct
  source 1..20: mol_type = other RNA
ctcacccttccttccattcc

SEQ ID NO: 11183 - RNA, 20 nt, synthetic construct
  source 1..20: mol_type = other RNA
cccttccttccattccagct

SEQ ID NO: 11184 - RNA, 20 nt, synthetic construct
  source 1..20: mol_type = other RNA
caaaggcagagataatatct

SEQ ID NO: 11185 - RNA, 20 nt, synthetic construct
  source 1..20: mol_type = other RNA
aaggcagagataatatctaa

SEQ ID NO: 11186 - RNA, 20 nt, synthetic construct
  source 1..20: mol_type = other RNA
gcctttgagaggcagctgat

SEQ ID NO: 11187 - RNA, 20 nt, synthetic construct
  source 1..20: mol_type = other RNA
tgtcagtttgaaataaggtg

SEQ ID NO: 11188 - RNA, 20 nt, synthetic construct
  source 1..20: mol_type = other RNA
tggcttctactcttcttgaa

SEQ ID NO: 11189 - RNA, 20 nt, synthetic construct
  source 1..20: mol_type = other RNA
tcttgaaaatttcccccact

SEQ ID NO: 11190 - RNA, 20 nt, synthetic construct
  source 1..20: mol_type = other RNA
tgtaacattacattgaaact

SEQ ID NO: 11191 - RNA, 20 nt, synthetic construct
  source 1..20: mol_type = other RNA
aacctcaaaccgccagcttt

SEQ ID NO: 11192 - RNA, 20 nt, synthetic construct
  source 1..20: mol_type = other RNA
aaccgccagctttgaggaag

SEQ ID NO: 11193 - RNA, 20 nt, synthetic construct
  source 1..20: mol_type = other RNA
aagctggcggtttgaggtta

SEQ ID NO: 11194 - RNA, 20 nt, synthetic construct
  source 1..20: mol_type = other RNA
tgccaacagctgatgatgac

SEQ ID NO: 11195 - RNA, 20 nt, synthetic construct
  source 1..20: mol_type = other RNA
aaactcatgccaacagctga

SEQ ID NO: 11196 - RNA, 20 nt, synthetic construct
  source 1..20: mol_type = other RNA
agaacggaaagatttttctt

SEQ ID NO: 11197 - RNA, 20 nt, synthetic construct
  source 1..20: mol_type = other RNA
tcttgcatttttaatatatg

SEQ ID NO: 11198 - RNA, 20 nt, synthetic construct
  source 1..20: mol_type = other RNA
gtaaacaactgcttattaag

SEQ ID NO: 11199 - RNA, 20 nt, synthetic construct
  source 1..20: mol_type = other RNA
cattgcctcagtcttaaact

SEQ ID NO: 11200 - RNA, 20 nt, synthetic construct
  source 1..20: mol_type = other RNA
ttgcctcagtcttaaactag

SEQ ID NO: 11201 - RNA, 20 nt, synthetic construct
  source 1..20: mol_type = other RNA
gtcttaaactagatgtagtt

SEQ ID NO: 11202 - RNA, 20 nt, synthetic construct
  source 1..20: mol_type = other RNA
caaaagcttttattttgctg

SEQ ID NO: 11203 - RNA, 20 nt, synthetic construct
  source 1..20: mol_type = other RNA
gaagtcttaaaatgatacca

SEQ ID NO: 11204 - RNA, 20 nt, synthetic construct
  source 1..20: mol_type = other RNA
tggtctgaagaaaataaagc

SEQ ID NO: 11205 - RNA, 20 nt, synthetic construct
  source 1..20: mol_type = other RNA
acaacttagaagtaagaaac

SEQ ID NO: 11206 - RNA, 20 nt, synthetic construct
  source 1..20: mol_type = other RNA
gaaggtagacattcccgggg

SEQ ID NO: 11207 - RNA, 20 nt, synthetic construct
  source 1..20: mol_type = other RNA
atccctgtcatcaaagcaac

SEQ ID NO: 11208 - RNA, 20 nt, synthetic construct
  source 1..20: mol_type = other RNA
aaatctccatccctgtcatc

SEQ ID NO: 11209 - RNA, 20 nt, synthetic construct
  source 1..20: mol_type = other RNA
gtcctcaaaatctccatccc

SEQ ID NO: 11210 - RNA, 20 nt, synthetic construct
  source 1..20: mol_type = other RNA
taaacttagaaaacattgct

SEQ ID NO: 11211 - RNA, 20 nt, synthetic construct
  source 1..20: mol_type = other RNA
ttctcttaaacttagaaaac

SEQ ID NO: 11212 - RNA, 20 nt, synthetic construct
  source 1..20: mol_type = other RNA
ttaatataagccacaccaat

SEQ ID NO: 11213 - RNA, 20 nt, synthetic construct
  source 1..20: mol_type = other RNA
aaatactgataataaaatta

SEQ ID NO: 11214 - RNA, 20 nt, synthetic construct
  source 1..20: mol_type = other RNA
gaataaattgatgtagaaaa

SEQ ID NO: 11215 - RNA, 20 nt, synthetic construct
  source 1..20: mol_type = other RNA
gacatacgcaatgatcagat

SEQ ID NO: 11216 - RNA, 20 nt, synthetic construct
  source 1..20: mol_type = other RNA
ttgaatctgatcattgcgta

SEQ ID NO: 11217 - RNA, 20 nt, synthetic construct
  source 1..20: mol_type = other RNA
actgaatcacaactagagtc

SEQ ID NO: 11218 - RNA, 20 nt, synthetic construct
  source 1..20: mol_type = other RNA
agttgtgattcagttgagac

SEQ ID NO: 11219 - RNA, 20 nt, synthetic construct
  source 1..20: mol_type = other RNA
tacctcagcctcctgagtag

SEQ ID NO: 11220 - RNA, 20 nt, synthetic construct
  source 1..20: mol_type = other RNA
gcctcctgagtagctgggac

SEQ ID NO: 11221 - RNA, 20 nt, synthetic construct
  source 1..20: mol_type = other RNA
tgagtagctgggactacagg

SEQ ID NO: 11222 - RNA, 20 nt, synthetic construct
  source 1..20: mol_type = other RNA
ggaggctgaggtaggaggat

SEQ ID NO: 11223 - RNA, 20 nt, synthetic construct
  source 1..20: mol_type = other RNA
tacctttcttcctaaagaat

SEQ ID NO: 11224 - RNA, 20 nt, synthetic construct
  source 1..20: mol_type = other RNA
tgatacccactgatccagcc

SEQ ID NO: 11225 - RNA, 20 nt, synthetic construct
  source 1..20: mol_type = other RNA
tagagttatcctgaagtttt

SEQ ID NO: 11226 - RNA, 20 nt, synthetic construct
  source 1..20: mol_type = other RNA
acgagtacggaagcttctgc

SEQ ID NO: 11227 - RNA, 20 nt, synthetic construct
  source 1..20: mol_type = other RNA
ctgccaagcctcacaaatat

SEQ ID NO: 11228 - RNA, 20 nt, synthetic construct
  source 1..20: mol_type = other RNA
gccaagcctcacaaatattt

SEQ ID NO: 11229 - RNA, 20 nt, synthetic construct
  source 1..20: mol_type = other RNA
caaatatttatatttacctt

SEQ ID NO: 11230 - RNA, 20 nt, synthetic construct
  source 1..20: mol_type = other RNA
tccagattggcgagctgata

SEQ ID NO: 11231 - RNA, 20 nt, synthetic construct
  source 1..20: mol_type = other RNA
ccaatctggaagagccaagg

SEQ ID NO: 11232 - RNA, 20 nt, synthetic construct
  source 1..20: mol_type = other RNA
tatgtaacgtatttgacatg

SEQ ID NO: 11233 - RNA, 20 nt, synthetic construct
  source 1..20: mol_type = other RNA
cgtatgtaacgtatttgaca

SEQ ID NO: 11234 - RNA, 20 nt, synthetic construct
  source 1..20: mol_type = other RNA
ctggtgtagtgatggctctc

SEQ ID NO: 11235 - RNA, 20 nt, synthetic construct
  source 1..20: mol_type = other RNA
tgatggaaaaaagcaaaata

SEQ ID NO: 11236 - RNA, 20 nt, synthetic construct
  source 1..20: mol_type = other RNA
tttcctaatcaaacttacaa

SEQ ID NO: 11237 - RNA, 20 nt, synthetic construct
  source 1..20: mol_type = other RNA
attatattaattacacatgc

SEQ ID NO: 11238 - RNA, 20 nt, synthetic construct
  source 1..20: mol_type = other RNA
ccattatattaattacacat

SEQ ID NO: 11239 - RNA, 20 nt, synthetic construct
  source 1..20: mol_type = other RNA
gtggtgcctactctccatta

SEQ ID NO: 11240 - RNA, 20 nt, synthetic construct
  source 1..20: mol_type = other RNA
ccagtagagaacagggggag

SEQ ID NO: 11241 - RNA, 20 nt, synthetic construct
  source 1..20: mol_type = other RNA
actggggagcagtcattagc

SEQ ID NO: 11242 - RNA, 20 nt, synthetic construct
  source 1..20: mol_type = other RNA
ccctgttctctactggggag

SEQ ID NO: 11243 - RNA, 20 nt, synthetic construct
  source 1..20: mol_type = other RNA
tttatgcagttataaccatt

SEQ ID NO: 11244 - RNA, 20 nt, synthetic construct
  source 1..20: mol_type = other RNA
catttatcctgaatttatta

SEQ ID NO: 11245 - RNA, 20 nt, synthetic construct
  source 1..20: mol_type = other RNA
gaatgatattatagcagcta

SEQ ID NO: 11246 - RNA, 20 nt, synthetic construct
  source 1..20: mol_type = other RNA
tcaagtttagtgcaagttga

SEQ ID NO: 11247 - RNA, 20 nt, synthetic construct
  source 1..20: mol_type = other RNA
ctagtaaggtttatgctctg

SEQ ID NO: 11248 - RNA, 20 nt, synthetic construct
  source 1..20: mol_type = other RNA
agtaaggtttatgctctgta

SEQ ID NO: 11249 - RNA, 20 nt, synthetic construct
  source 1..20: mol_type = other RNA
gtaaattaaaaagatgcagt

SEQ ID NO: 11250 - RNA, 20 nt, synthetic construct
  source 1..20: mol_type = other RNA
atcaatatttcaatgacttc

SEQ ID NO: 11251 - RNA, 20 nt, synthetic construct
  source 1..20: mol_type = other RNA
acacctaaaacagtgcctag

SEQ ID NO: 11252 - RNA, 20 nt, synthetic construct
  source 1..20: mol_type = other RNA
taagtgtctactaggcaccc

SEQ ID NO: 11253 - RNA, 20 nt, synthetic construct
  source 1..20: mol_type = other RNA
ttgaaacagttgtctgaact

SEQ ID NO: 11254 - RNA, 20 nt, synthetic construct
  source 1..20: mol_type = other RNA
ttccaaaatcagcaaagctc

SEQ ID NO: 11255 - RNA, 20 nt, synthetic construct
  source 1..20: mol_type = other RNA
atggcatatgaagaactaaa

SEQ ID NO: 11256 - RNA, 20 nt, synthetic construct
  source 1..20: mol_type = other RNA
agcagcagcagcagtggggt

SEQ ID NO: 11257 - RNA, 20 nt, synthetic construct
  source 1..20: mol_type = other RNA
cagatggggtcccactgcca

SEQ ID NO: 11258 - RNA, 20 nt, synthetic construct
  source 1..20: mol_type = other RNA
accaactgggcttttctgat

SEQ ID NO: 11259 - RNA, 20 nt, synthetic construct
  source 1..20: mol_type = other RNA
ataattaagaaaccactttt

SEQ ID NO: 11260 - RNA, 20 nt, synthetic construct
  source 1..20: mol_type = other RNA
caataattaagaaaccactt

SEQ ID NO: 11261 - RNA, 20 nt, synthetic construct
  source 1..20: mol_type = other RNA
tccttttcctctcaataatt

SEQ ID NO: 11262 - RNA, 20 nt, synthetic construct
  source 1..20: mol_type = other RNA
tgtggataatatacagatat

SEQ ID NO: 11263 - RNA, 20 nt, synthetic construct
  source 1..20: mol_type = other RNA
cctgtggataatatacagat

SEQ ID NO: 11264 - RNA, 20 nt, synthetic construct
  source 1..20: mol_type = other RNA
ctatggtttcattactgtga

SEQ ID NO: 11265 - RNA, 20 nt, synthetic construct
  source 1..20: mol_type = other RNA
cagtaatgaaaccataggga

SEQ ID NO: 11266 - RNA, 20 nt, synthetic construct
  source 1..20: mol_type = other RNA
caacgtgtttaattttattt

SEQ ID NO: 11267 - RNA, 20 nt, synthetic construct
  source 1..20: mol_type = other RNA
cacaacgtgtttaattttat

SEQ ID NO: 11268 - RNA, 20 nt, synthetic construct
  source 1..20: mol_type = other RNA
acagtgaaggtatctttggt

SEQ ID NO: 11269 - RNA, 20 nt, synthetic construct
  source 1..20: mol_type = other RNA
taggtaacattaagggttaa

SEQ ID NO: 11270 - RNA, 20 nt, synthetic construct
  source 1..20: mol_type = other RNA
tttcatggacatcttttaac

SEQ ID NO: 11271 - RNA, 20 nt, synthetic construct
  source 1..20: mol_type = other RNA
tggtgcctcatttcatggac

SEQ ID NO: 11272 - RNA, 20 nt, synthetic construct
  source 1..20: mol_type = other RNA
gttccacgaactattctacc

SEQ ID NO: 11273 - RNA, 20 nt, synthetic construct
  source 1..20: mol_type = other RNA
agcgatcttcccacctcagc

SEQ ID NO: 11274 - RNA, 20 nt, synthetic construct
  source 1..20: mol_type = other RNA
atagtgatcacatagcgctc

SEQ ID NO: 11275 - RNA, 20 nt, synthetic construct
  source 1..20: mol_type = other RNA
gccagaagcagcaatctctc

SEQ ID NO: 11276 - RNA, 20 nt, synthetic construct
  source 1..20: mol_type = other RNA
caattattacaagtttagta

SEQ ID NO: 11277 - RNA, 20 nt, synthetic construct
  source 1..20: mol_type = other RNA
attattacaagtttagtaga

SEQ ID NO: 11278 - RNA, 20 nt, synthetic construct
  source 1..20: mol_type = other RNA
tttcattcttgataaattaa

SEQ ID NO: 11279 - RNA, 20 nt, synthetic construct
  source 1..20: mol_type = other RNA
ctcatttcattcttgataaa

SEQ ID NO: 11280 - RNA, 20 nt, synthetic construct
  source 1..20: mol_type = other RNA
ggcagttcagaactttgtca

SEQ ID NO: 11281 - RNA, 20 nt, synthetic construct
  source 1..20: mol_type = other RNA
gttaagtatatttaatagaa

SEQ ID NO: 11282 - RNA, 20 nt, synthetic construct
  source 1..20: mol_type = other RNA
tttcactagtttggaaagaa

SEQ ID NO: 11283 - RNA, 20 nt, synthetic construct
  source 1..20: mol_type = other RNA
gtagtccaccaaatatgaaa

SEQ ID NO: 11284 - RNA, 20 nt, synthetic construct
  source 1..20: mol_type = other RNA
ttactaagtgctttttattc

SEQ ID NO: 11285 - RNA, 20 nt, synthetic construct
  source 1..20: mol_type = other RNA
tgataagaacactaacatga

SEQ ID NO: 11286 - RNA, 20 nt, synthetic construct
  source 1..20: mol_type = other RNA
gacttcttttttaaatggca

SEQ ID NO: 11287 - RNA, 20 nt, synthetic construct
  source 1..20: mol_type = other RNA
gctttctcagacttcttttt

SEQ ID NO: 11288 - RNA, 20 nt, synthetic construct
  source 1..20: mol_type = other RNA
ttgctttgattccccttttt

SEQ ID NO: 11289 - RNA, 20 nt, synthetic construct
  source 1..20: mol_type = other RNA
agaatggctattcttattca

SEQ ID NO: 11290 - RNA, 20 nt, synthetic construct
  source 1..20: mol_type = other RNA
actctagaatggctattctt

SEQ ID NO: 11291 - RNA, 20 nt, synthetic construct
  source 1..20: mol_type = other RNA
atgagtacccatcactagag

SEQ ID NO: 11292 - RNA, 20 nt, synthetic construct
  source 1..20: mol_type = other RNA
tagagtctttctctactcta

SEQ ID NO: 11293 - RNA, 20 nt, synthetic construct
  source 1..20: mol_type = other RNA
agtgatgggtactcatagag

SEQ ID NO: 11294 - RNA, 20 nt, synthetic construct
  source 1..20: mol_type = other RNA
gctgctgccctctagtgatg

SEQ ID NO: 11295 - RNA, 20 nt, synthetic construct
  source 1..20: mol_type = other RNA
ctctgctgctgccctctagt

SEQ ID NO: 11296 - RNA, 20 nt, synthetic construct
  source 1..20: mol_type = other RNA
ctacctcactctgctgctgc

SEQ ID NO: 11297 - RNA, 20 nt, synthetic construct
  source 1..20: mol_type = other RNA
ccctacctcactctgctgct

SEQ ID NO: 11298 - RNA, 20 nt, synthetic construct
  source 1..20: mol_type = other RNA
gagcactcgccagttttctg

SEQ ID NO: 11299 - RNA, 20 nt, synthetic construct
  source 1..20: mol_type = other RNA
gagaaggacttgctctccct

SEQ ID NO: 11300 - RNA, 20 nt, synthetic construct
  source 1..20: mol_type = other RNA
atcacattgctgttttttga

SEQ ID NO: 11301 - RNA, 20 nt, synthetic construct
  source 1..20: mol_type = other RNA
ctaaaaattattttgaaaaa

SEQ ID NO: 11302 - RNA, 20 nt, synthetic construct
  source 1..20: mol_type = other RNA
gggcattaatagggtaagca

SEQ ID NO: 11303 - RNA, 20 nt, synthetic construct
  source 1..20: mol_type = other RNA
ggtggtcctggtgatgacct

SEQ ID NO: 11304 - RNA, 20 nt, synthetic construct
  source 1..20: mol_type = other RNA
ttggaagttctgtgtgtagg

SEQ ID NO: 11305 - RNA, 20 nt, synthetic construct
  source 1..20: mol_type = other RNA
ttataggtaagtgatcagaa

SEQ ID NO: 11306 - RNA, 20 nt, synthetic construct
  source 1..20: mol_type = other RNA
gttcagtctccttataggta

SEQ ID NO: 11307 - RNA, 20 nt, synthetic construct
  source 1..20: mol_type = other RNA
ggtcacagcatgtgttagag

SEQ ID NO: 11308 - RNA, 20 nt, synthetic construct
  source 1..20: mol_type = other RNA
aacacatgctgtgaccagag

SEQ ID NO: 11309 - RNA, 20 nt, synthetic construct
  source 1..20: mol_type = other RNA
atcagggtttctcaacctgg

SEQ ID NO: 11310 - RNA, 20 nt, synthetic construct
  source 1..20: mol_type = other RNA
acctggactctagtgacatt

SEQ ID NO: 11311 - RNA, 20 nt, synthetic construct
  source 1..20: mol_type = other RNA
agtgacattctggacaggat

SEQ ID NO: 11312 - RNA, 20 nt, synthetic construct
  source 1..20: mol_type = other RNA
taaggggtattcgaatactt

SEQ ID NO: 11313 - RNA, 20 nt, synthetic construct
  source 1..20: mol_type = other RNA
caattccaataagttaagct

SEQ ID NO: 11314 - RNA, 20 nt, synthetic construct
  source 1..20: mol_type = other RNA
tttatttccagcatgacggt

SEQ ID NO: 11315 - RNA, 20 nt, synthetic construct
  source 1..20: mol_type = other RNA
catgtatctcttttatttcc

SEQ ID NO: 11316 - RNA, 20 nt, synthetic construct
  source 1..20: mol_type = other RNA
aagagatgttaaataaaatt

SEQ ID NO: 11317 - RNA, 20 nt, synthetic construct
  source 1..20: mol_type = other RNA
ttgaggtaaatgcttttttt

SEQ ID NO: 11318 - RNA, 20 nt, synthetic construct
  source 1..20: mol_type = other RNA
cttctaatcttgtgtagcaa

SEQ ID NO: 11319 - RNA, 20 nt, synthetic construct
  source 1..20: mol_type = other RNA
ttcaggattcagtatcttta

SEQ ID NO: 11320 - RNA, 20 nt, synthetic construct
  source 1..20: mol_type = other RNA
tgatgtaacaaaataattat

SEQ ID NO: 11321 - RNA, 20 nt, synthetic construct
  source 1..20: mol_type = other RNA
tcagttcaatatgaattaag

SEQ ID NO: 11322 - RNA, 20 nt, synthetic construct
  source 1..20: mol_type = other RNA
gctatatgaaaataatatta

SEQ ID NO: 11323 - RNA, 20 nt, synthetic construct
  source 1..20: mol_type = other RNA
aatctagatagtttggataa

SEQ ID NO: 11324 - RNA, 20 nt, synthetic construct
  source 1..20: mol_type = other RNA
gttggtaagtacgttattct

SEQ ID NO: 11325 - RNA, 20 nt, synthetic construct
  source 1..20: mol_type = other RNA
ttgtcttttcaatcgatgat

SEQ ID NO: 11326 - RNA, 20 nt, synthetic construct
  source 1..20: mol_type = other RNA
acgtaacacagataatcaat

SEQ ID NO: 11327 - RNA, 20 nt, synthetic construct
  source 1..20: mol_type = other RNA
acaatacttgttattatctg

SEQ ID NO: 11328 - RNA, 20 nt, synthetic construct
  source 1..20: mol_type = other RNA
tatattgctggtgggattac

SEQ ID NO: 11329 - RNA, 20 nt, synthetic construct
  source 1..20: mol_type = other RNA
tggatgtatatctagaagtc

SEQ ID NO: 11330 - RNA, 20 nt, synthetic construct
  source 1..20: mol_type = other RNA
aatttaagaattttctcctt

SEQ ID NO: 11331 - RNA, 20 nt, synthetic construct
  source 1..20: mol_type = other RNA
ttgaagagctgctgctgaac

SEQ ID NO: 11332 - RNA, 20 nt, synthetic construct
  source 1..20: mol_type = other RNA
tcaaggagaaaattcttaaa

SEQ ID NO: 11333 - RNA, 20 nt, synthetic construct
  source 1..20: mol_type = other RNA
caagatcatgctgtcctttt

SEQ ID NO: 11334 - RNA, 20 nt, synthetic construct
  source 1..20: mol_type = other RNA
agatcatgctgtccttttgt

SEQ ID NO: 11335 - RNA, 20 nt, synthetic construct
  source 1..20: mol_type = other RNA
aagctaaaatgcttggaatt

SEQ ID NO: 11336 - RNA, 20 nt, synthetic construct
  source 1..20: mol_type = other RNA
ctatctaattcacaaacatc

SEQ ID NO: 11337 - RNA, 20 nt, synthetic construct
  source 1..20: mol_type = other RNA
atctaattcacaaacatcct

SEQ ID NO: 11338 - RNA, 20 nt, synthetic construct
  source 1..20: mol_type = other RNA
cagatctccttggcacgatt

SEQ ID NO: 11339 - RNA, 20 nt, synthetic construct
  source 1..20: mol_type = other RNA
ttggcacgattccagcccag

SEQ ID NO: 11340 - RNA, 20 nt, synthetic construct
  source 1..20: mol_type = other RNA
gtatctgggctggaatcgtg

SEQ ID NO: 11341 - RNA, 20 nt, synthetic construct
  source 1..20: mol_type = other RNA
aaatactgcaaaaagaaata

SEQ ID NO: 11342 - RNA, 20 nt, synthetic construct
  source 1..20: mol_type = other RNA
aggcattcattcctaaaagc

SEQ ID NO: 11343 - RNA, 20 nt, synthetic construct
  source 1..20: mol_type = other RNA
cggtaagtgtaccggccatc

SEQ ID NO: 11344 - RNA, 20 nt, synthetic construct
  source 1..20: mol_type = other RNA
acactagtggatggccggta

SEQ ID NO: 11345 - RNA, 20 nt, synthetic construct
  source 1..20: mol_type = other RNA
aggcccggccacagcagctg

SEQ ID NO: 11346 - RNA, 20 nt, synthetic construct
  source 1..20: mol_type = other RNA
tggcgaaaataacaaaaaga

SEQ ID NO: 11347 - RNA, 20 nt, synthetic construct
  source 1..20: mol_type = other RNA
ttaccacttttctttttgtt

SEQ ID NO: 11348 - RNA, 20 nt, synthetic construct
  source 1..20: mol_type = other RNA
ttcataaaacaaacctatca

SEQ ID NO: 11349 - RNA, 20 nt, synthetic construct
  source 1..20: mol_type = other RNA
ctcattcataaaacaaacct

SEQ ID NO: 11350 - RNA, 20 nt, synthetic construct
  source 1..20: mol_type = other RNA
atgaaattactcgctcattc

SEQ ID NO: 11351 - RNA, 20 nt, synthetic construct
  source 1..20: mol_type = other RNA
gcttaataatccccagtttg

SEQ ID NO: 11352 - RNA, 20 nt, synthetic construct
  source 1..20: mol_type = other RNA
agtcatctcagcttaataat

SEQ ID NO: 11353 - RNA, 20 nt, synthetic construct
  source 1..20: mol_type = other RNA
ttatattgaccatttagagc

SEQ ID NO: 11354 - RNA, 20 nt, synthetic construct
  source 1..20: mol_type = other RNA
aaatggtcaatataaagagt

SEQ ID NO: 11355 - RNA, 20 nt, synthetic construct
  source 1..20: mol_type = other RNA
atgcactcataattcagtct

SEQ ID NO: 11356 - RNA, 20 nt, synthetic construct
  source 1..20: mol_type = other RNA
taattcagtcttcaacttct

SEQ ID NO: 11357 - RNA, 20 nt, synthetic construct
  source 1..20: mol_type = other RNA
tgtttgcagttcttagcttt

SEQ ID NO: 11358 - RNA, 20 nt, synthetic construct
  source 1..20: mol_type = other RNA
gaagttgctaattccttgtt

SEQ ID NO: 11359 - RNA, 20 nt, synthetic construct
  source 1..20: mol_type = other RNA
attttacttaccatgcagtt

SEQ ID NO: 11360 - RNA, 20 nt, synthetic construct
  source 1..20: mol_type = other RNA
tatgaaagtgttttaactag

SEQ ID NO: 11361 - RNA, 20 nt, synthetic construct
  source 1..20: mol_type = other RNA
ttataaagagaactactttt

SEQ ID NO: 11362 - RNA, 20 nt, synthetic construct
  source 1..20: mol_type = other RNA
ttataaagagtattacacaa

SEQ ID NO: 11363 - RNA, 20 nt, synthetic construct
  source 1..20: mol_type = other RNA
acaagggtcttcatcttaca

SEQ ID NO: 11364 - RNA, 20 nt, synthetic construct
  source 1..20: mol_type = other RNA
acaaagacaacaaaagtgta

SEQ ID NO: 11365 - RNA, 20 nt, synthetic construct
  source 1..20: mol_type = other RNA
ctattgaatatgtaaatgtg

SEQ ID NO: 11366 - RNA, 20 nt, synthetic construct
  source 1..20: mol_type = other RNA
catttacatattcaatagtg

SEQ ID NO: 11367 - RNA, 20 nt, synthetic construct
  source 1..20: mol_type = other RNA
tagggatcagccaatcctca

SEQ ID NO: 11368 - RNA, 20 nt, synthetic construct
  source 1..20: mol_type = other RNA
atcagcaaatactgtatttc

SEQ ID NO: 11369 - RNA, 20 nt, synthetic construct
  source 1..20: mol_type = other RNA
ccagccactaggcacaggag

SEQ ID NO: 11370 - RNA, 20 nt, synthetic construct
  source 1..20: mol_type = other RNA
tgtgcctagtggctggtgag

SEQ ID NO: 11371 - RNA, 20 nt, synthetic construct
  source 1..20: mol_type = other RNA
cactaaagcattttccgaag

SEQ ID NO: 11372 - RNA, 20 nt, synthetic construct
  source 1..20: mol_type = other RNA
tgacttcggaaaatgcttta

SEQ ID NO: 11373 - RNA, 20 nt, synthetic construct
  source 1..20: mol_type = other RNA
taccctgtgaagggctgtac

SEQ ID NO: 11374 - RNA, 20 nt, synthetic construct
  source 1..20: mol_type = other RNA
gcactaaatgtctctctgtc

SEQ ID NO: 11375 - RNA, 20 nt, synthetic construct
  source 1..20: mol_type = other RNA
ctgtcctaagctgcacctta

SEQ ID NO: 11376 - RNA, 20 nt, synthetic construct
  source 1..20: mol_type = other RNA
gtcctaagctgcaccttatt

SEQ ID NO: 11377 - RNA, 20 nt, synthetic construct
  source 1..20: mol_type = other RNA
tgaaataaggtgcagcttag

SEQ ID NO: 11378 - RNA, 20 nt, synthetic construct
  source 1..20: mol_type = other RNA
acttgctttttttcataatt

SEQ ID NO: 11379 - RNA, 20 nt, synthetic construct
  source 1..20: mol_type = other RNA
tttgtaaaactcaacttgct

SEQ ID NO: 11380 - RNA, 20 nt, synthetic construct
  source 1..20: mol_type = other RNA
atattcatcaacatgcctca

SEQ ID NO: 11381 - RNA, 20 nt, synthetic construct
  source 1..20: mol_type = other RNA
aaattatacagccaatcata

SEQ ID NO: 11382 - RNA, 20 nt, synthetic construct
  source 1..20: mol_type = other RNA
gatttaataaacttgcaaag

SEQ ID NO: 11383 - RNA, 20 nt, synthetic construct
  source 1..20: mol_type = other RNA
caagtagttgacctttaata

SEQ ID NO: 11384 - RNA, 20 nt, synthetic construct
  source 1..20: mol_type = other RNA
tcagcaagaagcaaatatat

SEQ ID NO: 11385 - RNA, 20 nt, synthetic construct
  source 1..20: mol_type = other RNA
tctccaattacaatgaagat

SEQ ID NO: 11386 - RNA, 20 nt, synthetic construct
  source 1..20: mol_type = other RNA
aattacaatgaagatatctg

SEQ ID NO: 11387 - RNA, 20 nt, synthetic construct
  source 1..20: mol_type = other RNA
gtgacattatcagatatctt

SEQ ID NO: 11388 - RNA, 20 nt, synthetic construct
  source 1..20: mol_type = other RNA
actctgtgacattatcagat

SEQ ID NO: 11389 - RNA, 20 nt, synthetic construct
  source 1..20: mol_type = other RNA
acattagatgaagccttaga

SEQ ID NO: 11390 - RNA, 20 nt, synthetic construct
  source 1..20: mol_type = other RNA
aaggcttcatctaatgttga

SEQ ID NO: 11391 - RNA, 20 nt, synthetic construct
  source 1..20: mol_type = other RNA
catctgaatcatcagaatgt

SEQ ID NO: 11392 - RNA, 20 nt, synthetic construct
  source 1..20: mol_type = other RNA
tagagaaataatcaaaagga

SEQ ID NO: 11393 - RNA, 20 nt, synthetic construct
  source 1..20: mol_type = other RNA
tcctcagctttgcgcttgaa

SEQ ID NO: 11394 - RNA, 20 nt, synthetic construct
  source 1..20: mol_type = other RNA
gtgtttcccagatggtcatc

SEQ ID NO: 11395 - RNA, 20 nt, synthetic construct
  source 1..20: mol_type = other RNA
tctctgtggtaagaattagg

SEQ ID NO: 11396 - RNA, 20 nt, synthetic construct
  source 1..20: mol_type = other RNA
ttgtgtcatctctgtggtaa

SEQ ID NO: 11397 - RNA, 20 nt, synthetic construct
  source 1..20: mol_type = other RNA
gaaaaatctcctacacataa

SEQ ID NO: 11398 - RNA, 20 nt, synthetic construct
  source 1..20: mol_type = other RNA
gtgacagttgacaaggagag

SEQ ID NO: 11399 - RNA, 20 nt, synthetic construct
  source 1..20: mol_type = other RNA
ctgacatgggggttcctcag

SEQ ID NO: 11400 - RNA, 20 nt, synthetic construct
  source 1..20: mol_type = other RNA
actgtcactgacatgggggt

SEQ ID NO: 11401 - RNA, 20 nt, synthetic construct
  source 1..20: mol_type = other RNA
ctccttgtcaactgtcactg

SEQ ID NO: 11402 - RNA, 20 nt, synthetic construct
  source 1..20: mol_type = other RNA
tcaaccatggtgaaactggg

SEQ ID NO: 11403 - RNA, 20 nt, synthetic construct
  source 1..20: mol_type = other RNA
aacccattcctgaatctgtg

SEQ ID NO: 11404 - RNA, 20 nt, synthetic construct
  source 1..20: mol_type = other RNA
cttacttgcagtaaatggcc

SEQ ID NO: 11405 - RNA, 20 nt, synthetic construct
  source 1..20: mol_type = other RNA
cttgtttcaggagatcactt

SEQ ID NO: 11406 - RNA, 20 nt, synthetic construct
  source 1..20: mol_type = other RNA
caccttaaattgcaaaagat

SEQ ID NO: 11407 - RNA, 20 nt, synthetic construct
  source 1..20: mol_type = other RNA
ccctgaagccatcgtgccca

SEQ ID NO: 11408 - RNA, 20 nt, synthetic construct
  source 1..20: mol_type = other RNA
ttgtacataccattttctct

SEQ ID NO: 11409 - RNA, 20 nt, synthetic construct
  source 1..20: mol_type = other RNA
aaatgagagagaaaatggta

SEQ ID NO: 11410 - RNA, 20 nt, synthetic construct
  source 1..20: mol_type = other RNA
ggaaaggcttccttgaggaa

SEQ ID NO: 11411 - RNA, 20 nt, synthetic construct
  source 1..20: mol_type = other RNA
tcttctgagccctgcaaact

SEQ ID NO: 11412 - RNA, 20 nt, synthetic construct
  source 1..20: mol_type = other RNA
ctaggaagttccaaactttc

SEQ ID NO: 11413 - RNA, 20 nt, synthetic construct
  source 1..20: mol_type = other RNA
aagccattcaacaagtctct

SEQ ID NO: 11414 - RNA, 20 nt, synthetic construct
  source 1..20: mol_type = other RNA
atattattattagcattttt

SEQ ID NO: 11415 - RNA, 20 nt, synthetic construct
  source 1..20: mol_type = other RNA
cagatggagatgaggaactt

SEQ ID NO: 11416 - RNA, 20 nt, synthetic construct
  source 1..20: mol_type = other RNA
gtttactaaaatatagcaag

SEQ ID NO: 11417 - RNA, 20 nt, synthetic construct
  source 1..20: mol_type = other RNA
cctcttgaatgctttgctgc

SEQ ID NO: 11418 - RNA, 20 nt, synthetic construct
  source 1..20: mol_type = other RNA
gcatgacccggctgtgagac

SEQ ID NO: 11419 - RNA, 20 nt, synthetic construct
  source 1..20: mol_type = other RNA
tgctgacacaagaggtgggt

SEQ ID NO: 11420 - RNA, 20 nt, synthetic construct
  source 1..20: mol_type = other RNA
cacagccgggtcatgctgac

SEQ ID NO: 11421 - RNA, 20 nt, synthetic construct
  source 1..20: mol_type = other RNA
aatcttaaagctccaaaatg

SEQ ID NO: 11422 - RNA, 20 nt, synthetic construct
  source 1..20: mol_type = other RNA
aaaatccagcagggcagtca

SEQ ID NO: 11423 - RNA, 20 nt, synthetic construct
  source 1..20: mol_type = other RNA
attttacactgttgataaag

SEQ ID NO: 11424 - RNA, 20 nt, synthetic construct
  source 1..20: mol_type = other RNA
tattcaaataatcatataaa

SEQ ID NO: 11425 - RNA, 20 nt, synthetic construct
  source 1..20: mol_type = other RNA
caaactcctgggctcaagtg

SEQ ID NO: 11426 - RNA, 20 nt, synthetic construct
  source 1..20: mol_type = other RNA
gtctgtagtcccagctatca

SEQ ID NO: 11427 - RNA, 20 nt, synthetic construct
  source 1..20: mol_type = other RNA
gaattgatttaatcctagta

SEQ ID NO: 11428 - RNA, 20 nt, synthetic construct
  source 1..20: mol_type = other RNA
tttaagtcattgagctcttg

SEQ ID NO: 11429 - RNA, 20 nt, synthetic construct
  source 1..20: mol_type = other RNA
aagagcacccagctccactg

SEQ ID NO: 11430 - RNA, 20 nt, synthetic construct
  source 1..20: mol_type = other RNA
caggaaaaaaaaaaaatcaa

SEQ ID NO: 11431 - RNA, 20 nt, synthetic construct
  source 1..20: mol_type = other RNA
ccaccacatagtttgctgtg

SEQ ID NO: 11432 - RNA, 20 nt, synthetic construct
  source 1..20: mol_type = other RNA
tttctcctttccagaaacca

SEQ ID NO: 11433 - RNA, 20 nt, synthetic construct
  source 1..20: mol_type = other RNA
gccctgcacacaatgacgtc

SEQ ID NO: 11434 - RNA, 20 nt, synthetic construct
  source 1..20: mol_type = other RNA
tccattaccgcaactcctca

SEQ ID NO: 11435 - RNA, 20 nt, synthetic construct
  source 1..20: mol_type = other RNA
ccctgagcatttcggcgtca

SEQ ID NO: 11436 - RNA, 20 nt, synthetic construct
  source 1..20: mol_type = other RNA
gagtttttaaagataatttg

SEQ ID NO: 11437 - RNA, 20 nt, synthetic construct
  source 1..20: mol_type = other RNA
gggtggtgtcagctgatcca

SEQ ID NO: 11438 - RNA, 20 nt, synthetic construct
  source 1..20: mol_type = other RNA
gctgatccatcgagtgcagg

SEQ ID NO: 11439 - RNA, 20 nt, synthetic construct
  source 1..20: mol_type = other RNA
gcaaaatatttcaagcacta

SEQ ID NO: 11440 - RNA, 20 nt, synthetic construct
  source 1..20: mol_type = other RNA
caggatgagatacgaggtcg

SEQ ID NO: 11441 - RNA, 20 nt, synthetic construct
  source 1..20: mol_type = other RNA
gcacaagatacaggtaataa

SEQ ID NO: 11442 - RNA, 20 nt, synthetic construct
  source 1..20: mol_type = other RNA
ggaagttaccctatatggtc

SEQ ID NO: 11443 - RNA, 20 nt, synthetic construct
  source 1..20: mol_type = other RNA
aaaaagggaaggcatgaata

SEQ ID NO: 11444 - RNA, 20 nt, synthetic construct
  source 1..20: mol_type = other RNA
tggagagctgaagtcaggac

SEQ ID NO: 11445 - RNA, 20 nt, synthetic construct
  source 1..20: mol_type = other RNA
tggtgaatggaggccacagt

SEQ ID NO: 11446 - RNA, 20 nt, synthetic construct
  source 1..20: mol_type = other RNA
aagtgcttccaaatgtcaca

SEQ ID NO: 11447 - RNA, 20 nt, synthetic construct
  source 1..20: mol_type = other RNA
catggtttcctgcaggtcta

SEQ ID NO: 11448 - RNA, 20 nt, synthetic construct
  source 1..20: mol_type = other RNA
aggcctttgcaaaaccataa

SEQ ID NO: 11449 - RNA, 20 nt, synthetic construct
  source 1..20: mol_type = other RNA
ctgtccacttgatgactcag

SEQ ID NO: 11450 - RNA, 20 nt, synthetic construct
  source 1..20: mol_type = other RNA
ggtttttcttctttggagag

SEQ ID NO: 11451 - RNA, 20 nt, synthetic construct
  source 1..20: mol_type = other RNA
ctctccaaagaagaaaaacc

SEQ ID NO: 11452 - RNA, 20 nt, synthetic construct
  source 1..20: mol_type = other RNA
aggaaaagccaggctcactt

SEQ ID NO: 11453 - RNA, 20 nt, synthetic construct
  source 1..20: mol_type = other RNA
acttggttaagtgacttaac

SEQ ID NO: 11454 - RNA, 20 nt, synthetic construct
  source 1..20: mol_type = other RNA
ctcactctctattgcatctc

SEQ ID NO: 11455 - RNA, 20 nt, synthetic construct
  source 1..20: mol_type = other RNA
cctttttgttgaacacttac

SEQ ID NO: 11456 - RNA, 20 nt, synthetic construct
  source 1..20: mol_type = other RNA
ggtcttgaagagtgaataag

SEQ ID NO: 11457 - RNA, 20 nt, synthetic construct
  source 1..20: mol_type = other RNA
tgaagagtgaataagagttc

SEQ ID NO: 11458 - RNA, 20 nt, synthetic construct
  source 1..20: mol_type = other RNA
actttttgaaataagcccct

SEQ ID NO: 11459 - RNA, 20 nt, synthetic construct
  source 1..20: mol_type = other RNA
acctagcaaatccaaaagca

SEQ ID NO: 11460 - RNA, 20 nt, synthetic construct
  source 1..20: mol_type = other RNA
tatttcttcctgtttttatt

SEQ ID NO: 11461 - RNA, 20 nt, synthetic construct
  source 1..20: mol_type = other RNA
actggcattgattgtattac

SEQ ID NO: 11462 - RNA, 20 nt, synthetic construct
  source 1..20: mol_type = other RNA
ctttcctcatctcagtggga

SEQ ID NO: 11463 - RNA, 20 nt, synthetic construct
  source 1..20: mol_type = other RNA
accaagggtcttgagttgga

SEQ ID NO: 11464 - RNA, 20 nt, synthetic construct
  source 1..20: mol_type = other RNA
gagattacacccaggtaccg

SEQ ID NO: 11465 - RNA, 20 nt, synthetic construct
  source 1..20: mol_type = other RNA
gagacttgtaatactctaag

SEQ ID NO: 11466 - RNA, 20 nt, synthetic construct
  source 1..20: mol_type = other RNA
ctgaccttaggtgggcacag

SEQ ID NO: 11467 - RNA, 20 nt, synthetic construct
  source 1..20: mol_type = other RNA
cacattaaccaggctccctt

SEQ ID NO: 11468 - RNA, 20 nt, synthetic construct
  source 1..20: mol_type = other RNA
ggggaaattcggcctttaaa

SEQ ID NO: 11469 - RNA, 20 nt, synthetic construct
  source 1..20: mol_type = other RNA
catggctaaggttccaagct

SEQ ID NO: 11470 - RNA, 20 nt, synthetic construct
  source 1..20: mol_type = other RNA
ttgtattgctgtgagaaatg

SEQ ID NO: 11471 - RNA, 20 nt, synthetic construct
  source 1..20: mol_type = other RNA
taatttcttcttataacact

SEQ ID NO: 11472 - RNA, 20 nt, synthetic construct
  source 1..20: mol_type = other RNA
caagatattttccttttata

SEQ ID NO: 11473 - RNA, 20 nt, synthetic construct
  source 1..20: mol_type = other RNA
cactaagataaatgcatatc

SEQ ID NO: 11474 - RNA, 20 nt, synthetic construct
  source 1..20: mol_type = other RNA
ggaaaggcaggaaaactcaa

SEQ ID NO: 11475 - RNA, 20 nt, synthetic construct
  source 1..20: mol_type = other RNA
catgcctcccttgttaaaag

SEQ ID NO: 11476 - RNA, 20 nt, synthetic construct
  source 1..20: mol_type = other RNA
aattcagaagttatccaaaa

SEQ ID NO: 11477 - RNA, 20 nt, synthetic construct
  source 1..20: mol_type = other RNA
ccaattctttatcaggtttt

SEQ ID NO: 11478 - RNA, 20 nt, synthetic construct
  source 1..20: mol_type = other RNA
tgattaaaataaaataagaa

SEQ ID NO: 11479 - RNA, 20 nt, synthetic construct
  source 1..20: mol_type = other RNA
ctactaaaaatacaaaaatt

SEQ ID NO: 11480 - RNA, 20 nt, synthetic construct
  source 1..20: mol_type = other RNA
ggtccgcaggaattaatgga

SEQ ID NO: 11481 - RNA, 20 nt, synthetic construct
  source 1..20: mol_type = other RNA
gcaggaattaatggagcaca

SEQ ID NO: 11482 - RNA, 20 nt, synthetic construct
  source 1..20: mol_type = other RNA
agcagggtctccagggctac

SEQ ID NO: 11483 - RNA, 20 nt, synthetic construct
  source 1..20: mol_type = other RNA
ccagggctactcagggagag

SEQ ID NO: 11484 - RNA, 20 nt, synthetic construct
  source 1..20: mol_type = other RNA
gtctctggtctctttctctc

SEQ ID NO: 11485 - RNA, 20 nt, synthetic construct
  source 1..20: mol_type = other RNA
ctggtctctttctctctgtg

SEQ ID NO: 11486 - RNA, 20 nt, synthetic construct
  source 1..20: mol_type = other RNA
ctttctctctgtgcaaactg

SEQ ID NO: 11487 - RNA, 20 nt, synthetic construct
  source 1..20: mol_type = other RNA
gaaaagtaaaaagtgcaatg

SEQ ID NO: 11488 - RNA, 20 nt, synthetic construct
  source 1..20: mol_type = other RNA
catgaattaaataaaaggca

SEQ ID NO: 11489 - RNA, 20 nt, synthetic construct
  source 1..20: mol_type = other RNA
tcaaaatgtaaatatgtggt

SEQ ID NO: 11490 - RNA, 20 nt, synthetic construct
  source 1..20: mol_type = other RNA
aaattatgttcaaatattag

SEQ ID NO: 11491 - RNA, 20 nt, synthetic construct
  source 1..20: mol_type = other RNA
taagctgcttctttggcttt

SEQ ID NO: 11492 - RNA, 20 nt, synthetic construct
  source 1..20: mol_type = other RNA
acctttgatctatttggttt

SEQ ID NO: 11493 - RNA, 20 nt, synthetic construct
  source 1..20: mol_type = other RNA
ccctggtgtgctgtattctc

SEQ ID NO: 11494 - RNA, 20 nt, synthetic construct
  source 1..20: mol_type = other RNA
cttgtgctaagactttaagg

SEQ ID NO: 11495 - RNA, 20 nt, synthetic construct
  source 1..20: mol_type = other RNA
tagcacaagtgactccattt

SEQ ID NO: 11496 - RNA, 20 nt, synthetic construct
  source 1..20: mol_type = other RNA
gttctagaatctgtgtttcc

SEQ ID NO: 11497 - RNA, 20 nt, synthetic construct
  source 1..20: mol_type = other RNA
agaatgtttgctatagagat

SEQ ID NO: 11498 - RNA, 20 nt, synthetic construct
  source 1..20: mol_type = other RNA
ctaggagagaagaaatgaat

SEQ ID NO: 11499 - RNA, 20 nt, synthetic construct
  source 1..20: mol_type = other RNA
tttttctgtaactgcttcat

SEQ ID NO: 11500 - RNA, 20 nt, synthetic construct
  source 1..20: mol_type = other RNA
ctctgcctcccatgaagatt

SEQ ID NO: 11501 - RNA, 20 nt, synthetic construct
  source 1..20: mol_type = other RNA
ggaggcagggaatataaggc

SEQ ID NO: 11502 - RNA, 20 nt, synthetic construct
  source 1..20: mol_type = other RNA
tagctgaagcgtgaatctgc

SEQ ID NO: 11503 - RNA, 20 nt, synthetic construct
  source 1..20: mol_type = other RNA
cacattgtggagtgtacttt

SEQ ID NO: 11504 - RNA, 20 nt, synthetic construct
  source 1..20: mol_type = other RNA
ataaaatttcttcattcttt

SEQ ID NO: 11505 - RNA, 20 nt, synthetic construct
  source 1..20: mol_type = other RNA
aattctttgttcaagatgcc

SEQ ID NO: 11506 - RNA, 20 nt, synthetic construct
  source 1..20: mol_type = other RNA
ttggcatcttgaacaaagaa

SEQ ID NO: 11507 - RNA, 20 nt, synthetic construct
  source 1..20: mol_type = other RNA
aggtccttggcatcttgaac

SEQ ID NO: 11508 - RNA, 20 nt, synthetic construct
  source 1..20: mol_type = other RNA
tcagccctctgaggctgtgc

SEQ ID NO: 11509 - RNA, 20 nt, synthetic construct
  source 1..20: mol_type = other RNA
gtgtcttcagccctctgagg

SEQ ID NO: 11510 - RNA, 20 nt, synthetic construct
  source 1..20: mol_type = other RNA
ggagctgtagcagccatcgt

SEQ ID NO: 11511 - RNA, 20 nt, synthetic construct
  source 1..20: mol_type = other RNA
gcgtgaggatgaaaggccaa

SEQ ID NO: 11512 - RNA, 20 nt, synthetic construct
  source 1..20: mol_type = other RNA
atttgtgaattatctaatct

SEQ ID NO: 11513 - RNA, 20 nt, synthetic construct
  source 1..20: mol_type = other RNA
tccatatcccctcttgaagc

SEQ ID NO: 11514 - RNA, 20 nt, synthetic construct
  source 1..20: mol_type = other RNA
aagaagaggggctggtggtg

SEQ ID NO: 11515 - RNA, 20 nt, synthetic construct
  source 1..20: mol_type = other RNA
caggtatctcctgctcacac

SEQ ID NO: 11516 - RNA, 20 nt, synthetic construct
  source 1..20: mol_type = other RNA
gtggagaatgggggatctct

SEQ ID NO: 11517 - RNA, 20 nt, synthetic construct
  source 1..20: mol_type = other RNA
cttgcccactcatccttccc

SEQ ID NO: 11518 - RNA, 20 nt, synthetic construct
  source 1..20: mol_type = other RNA
aggtaccctggctttcatcc

SEQ ID NO: 11519 - RNA, 20 nt, synthetic construct
  source 1..20: mol_type = other RNA
cttaaccactgtggcttccc

SEQ ID NO: 11520 - RNA, 20 nt, synthetic construct
  source 1..20: mol_type = other RNA
cctctcaatcactgtagaag

SEQ ID NO: 11521 - RNA, 20 nt, synthetic construct
  source 1..20: mol_type = other RNA
ctctgcaggctaatggcaga

SEQ ID NO: 11522 - RNA, 20 nt, synthetic construct
  source 1..20: mol_type = other RNA
ggagtaaatcggcattcagg

SEQ ID NO: 11523 - RNA, 20 nt, synthetic construct
  source 1..20: mol_type = other RNA
ccatacttgggcaccatcaa

SEQ ID NO: 11524 - RNA, 20 nt, synthetic construct
  source 1..20: mol_type = other RNA
tttcaagttctgagactcta

SEQ ID NO: 11525 - RNA, 20 nt, synthetic construct
  source 1..20: mol_type = other RNA
gatgtcctttcaagttctga

SEQ ID NO: 11526 - RNA, 20 nt, synthetic construct
  source 1..20: mol_type = other RNA
cagtttcccgatctgtaaaa

SEQ ID NO: 11527 - RNA, 20 nt, synthetic construct
  source 1..20: mol_type = other RNA
tcgcaccctcccagtctcag

SEQ ID NO: 11528 - RNA, 20 nt, synthetic construct
  source 1..20: mol_type = other RNA
cagtcaggaccagaaccagc

SEQ ID NO: 11529 - RNA, 20 nt, synthetic construct
  source 1..20: mol_type = other RNA
ctcttggagtccaggctgtc

SEQ ID NO: 11530 - RNA, 20 nt, synthetic construct
  source 1..20: mol_type = other RNA
aggctgtcaccagccctctc

SEQ ID NO: 11531 - RNA, 20 nt, synthetic construct
  source 1..20: mol_type = other RNA
ccagccctctccatccacag

SEQ ID NO: 11532 - RNA, 20 nt, synthetic construct
  source 1..20: mol_type = other RNA
gtggatggagagggctggtg

SEQ ID NO: 11533 - RNA, 20 nt, synthetic construct
  source 1..20: mol_type = other RNA
gccagggctattctgcggct

SEQ ID NO: 11534 - RNA, 20 nt, synthetic construct
  source 1..20: mol_type = other RNA
gtgggtaagaaatggattag

SEQ ID NO: 11535 - RNA, 20 nt, synthetic construct
  source 1..20: mol_type = other RNA
tttccttttttagagcataa

SEQ ID NO: 11536 - RNA, 20 nt, synthetic construct
  source 1..20: mol_type = other RNA
tctgagtttatgctctaaaa

SEQ ID NO: 11537 - RNA, 20 nt, synthetic construct
  source 1..20: mol_type = other RNA
cccaggcacagaattccagg

SEQ ID NO: 11538 - RNA, 20 nt, synthetic construct
  source 1..20: mol_type = other RNA
cttgcagggtggctggagcc

SEQ ID NO: 11539 - RNA, 20 nt, synthetic construct
  source 1..20: mol_type = other RNA
gatgcaactctggacccaac

SEQ ID NO: 11540 - RNA, 20 nt, synthetic construct
  source 1..20: mol_type = other RNA
agagttgcatcagacttggt

SEQ ID NO: 11541 - RNA, 20 nt, synthetic construct
  source 1..20: mol_type = other RNA
gctgattagtaatcttaatt

SEQ ID NO: 11542 - RNA, 20 nt, synthetic construct
  source 1..20: mol_type = other RNA
aacctaatcatgggagccct

SEQ ID NO: 11543 - RNA, 20 nt, synthetic construct
  source 1..20: mol_type = other RNA
ctcatgtgctgtgcaatctt

SEQ ID NO: 11544 - RNA, 20 nt, synthetic construct
  source 1..20: mol_type = other RNA
aggtccctgttgtacttcag

SEQ ID NO: 11545 - RNA, 20 nt, synthetic construct
  source 1..20: mol_type = other RNA
ctgttgtacttcagatttgc

SEQ ID NO: 11546 - RNA, 20 nt, synthetic construct
  source 1..20: mol_type = other RNA
cgtagcaaatctgaagtaca

SEQ ID NO: 11547 - RNA, 20 nt, synthetic construct
  source 1..20: mol_type = other RNA
tgtcctgtgcattgtaggtt

SEQ ID NO: 11548 - RNA, 20 nt, synthetic construct
  source 1..20: mol_type = other RNA
tgtgcattgtaggttgctac

SEQ ID NO: 11549 - RNA, 20 nt, synthetic construct
  source 1..20: mol_type = other RNA
cccagccgagccagggaaat

SEQ ID NO: 11550 - RNA, 20 nt, synthetic construct
  source 1..20: mol_type = other RNA
tgagccaagtgacacctggt

SEQ ID NO: 11551 - RNA, 20 nt, synthetic construct
  source 1..20: mol_type = other RNA
cttggctcaggacccagccg

SEQ ID NO: 11552 - RNA, 20 nt, synthetic construct
  source 1..20: mol_type = other RNA
ctgcactcaggaggtcccca

SEQ ID NO: 11553 - RNA, 20 nt, synthetic construct
  source 1..20: mol_type = other RNA
ccataaactaggggagattc

SEQ ID NO: 11554 - RNA, 20 nt, synthetic construct
  source 1..20: mol_type = other RNA
agttccagggcctgagcttc

SEQ ID NO: 11555 - RNA, 20 nt, synthetic construct
  source 1..20: mol_type = other RNA
actggatgaagggcagcctg

SEQ ID NO: 11556 - RNA, 20 nt, synthetic construct
  source 1..20: mol_type = other RNA
atgtccactggatgaagggc

SEQ ID NO: 11557 - RNA, 20 nt, synthetic construct
  source 1..20: mol_type = other RNA
cccaggatggcaggttagca

SEQ ID NO: 11558 - RNA, 20 nt, synthetic construct
  source 1..20: mol_type = other RNA
cgctccttccatgtggatcc

SEQ ID NO: 11559 - RNA, 20 nt, synthetic construct
  source 1..20: mol_type = other RNA
gaggcccgggaggagttaag

SEQ ID NO: 11560 - RNA, 20 nt, synthetic construct
  source 1..20: mol_type = other RNA
agaggagaaacctgcttctg

SEQ ID NO: 11561 - RNA, 20 nt, synthetic construct
  source 1..20: mol_type = other RNA
aagagctaggagaggctgtc

SEQ ID NO: 11562 - RNA, 20 nt, synthetic construct
  source 1..20: mol_type = other RNA
cccatccccaaagtcaaaga

SEQ ID NO: 11563 - RNA, 20 nt, synthetic construct
  source 1..20: mol_type = other RNA
ccagctcaaagccttttcat

SEQ ID NO: 11564 - RNA, 20 nt, synthetic construct
  source 1..20: mol_type = other RNA
agggggcaagtgcctcctgt

SEQ ID NO: 11565 - RNA, 20 nt, synthetic construct
  source 1..20: mol_type = other RNA
tttggatatattgttgttgg

SEQ ID NO: 11566 - RNA, 20 nt, synthetic construct
  source 1..20: mol_type = other RNA
ctgtacctgtaacttcccat

SEQ ID NO: 11567 - RNA, 20 nt, synthetic construct
  source 1..20: mol_type = other RNA
attgtaccttccagtccctg

SEQ ID NO: 11568 - RNA, 20 nt, synthetic construct
  source 1..20: mol_type = other RNA
ccaaagccaatttctaggct

SEQ ID NO: 11569 - RNA, 20 nt, synthetic construct
  source 1..20: mol_type = other RNA
gagttgtccccaaagccaat

SEQ ID NO: 11570 - RNA, 20 nt, synthetic construct
  source 1..20: mol_type = other RNA
agatgtgtgacgggagccac

SEQ ID NO: 11571 - RNA, 20 nt, synthetic construct
  source 1..20: mol_type = other RNA
cacatctggacacagagaag

SEQ ID NO: 11572 - RNA, 20 nt, synthetic construct
  source 1..20: mol_type = other RNA
tgcaatagcggagggtggag

SEQ ID NO: 11573 - RNA, 20 nt, synthetic construct
  source 1..20: mol_type = other RNA
gcggcacagtggttctggtg

SEQ ID NO: 11574 - RNA, 20 nt, synthetic construct
  source 1..20: mol_type = other RNA
cggccaccagaaccactgtg

SEQ ID NO: 11575 - RNA, 20 nt, synthetic construct
  source 1..20: mol_type = other RNA
gtcagcttcgtctgctgcgg

SEQ ID NO: 11576 - RNA, 20 nt, synthetic construct
  source 1..20: mol_type = other RNA
gcttcgtctgctgcggtgca

SEQ ID NO: 11577 - RNA, 20 nt, synthetic construct
  source 1..20: mol_type = other RNA
gctgcggtgcaggtggcctg

SEQ ID NO: 11578 - RNA, 20 nt, synthetic construct
  source 1..20: mol_type = other RNA
gtcaaggccagcatcccagg

SEQ ID NO: 11579 - RNA, 20 nt, synthetic construct
  source 1..20: mol_type = other RNA
aggccagcatcccagggcca

SEQ ID NO: 11580 - RNA, 20 nt, synthetic construct
  source 1..20: mol_type = other RNA
catcgaggtggccctgggat

SEQ ID NO: 11581 - RNA, 20 nt, synthetic construct
  source 1..20: mol_type = other RNA
ctggagaggtgataggggtc

SEQ ID NO: 11582 - RNA, 20 nt, synthetic construct
  source 1..20: mol_type = other RNA
tcagagaaggagagctgcag

SEQ ID NO: 11583 - RNA, 20 nt, synthetic construct
  source 1..20: mol_type = other RNA
gcagggcggggtgtggcagc

SEQ ID NO: 11584 - RNA, 20 nt, synthetic construct
  source 1..20: mol_type = other RNA
ccacccgctgccacaccccg

SEQ ID NO: 11585 - RNA, 20 nt, synthetic construct
  source 1..20: mol_type = other RNA
ttaaaagccatgcctctctc

SEQ ID NO: 11586 - RNA, 20 nt, synthetic construct
  source 1..20: mol_type = other RNA
cataccaagctgagctcagc

SEQ ID NO: 11587 - RNA, 20 nt, synthetic construct
  source 1..20: mol_type = other RNA
tgcaatccccctaagcttta

SEQ ID NO: 11588 - RNA, 20 nt, synthetic construct
  source 1..20: mol_type = other RNA
ttttcatttcaaatgaggaa

SEQ ID NO: 11589 - RNA, 20 nt, synthetic construct
  source 1..20: mol_type = other RNA
aggcacagctgcacctggca

SEQ ID NO: 11590 - RNA, 20 nt, synthetic construct
  source 1..20: mol_type = other RNA
ctggtggtgcccgctgtggg

SEQ ID NO: 11591 - RNA, 20 nt, synthetic construct
  source 1..20: mol_type = other RNA
gaaataaagccttcctgggc

SEQ ID NO: 11592 - RNA, 20 nt, synthetic construct
  source 1..20: mol_type = other RNA
gttctctgaatagcacccag

SEQ ID NO: 11593 - RNA, 20 nt, synthetic construct
  source 1..20: mol_type = other RNA
gttttgcccactgtggcacc

SEQ ID NO: 11594 - RNA, 20 nt, synthetic construct
  source 1..20: mol_type = other RNA
ctaaggtgacagaaggtggt

SEQ ID NO: 11595 - RNA, 20 nt, synthetic construct
  source 1..20: mol_type = other RNA
ccttagtgaccagctgggcc

SEQ ID NO: 11596 - RNA, 20 nt, synthetic construct
  source 1..20: mol_type = other RNA
cctgctgggatggccccagg

SEQ ID NO: 11597 - RNA, 20 nt, synthetic construct
  source 1..20: mol_type = other RNA
aggtcacacagcagtagaac

SEQ ID NO: 11598 - RNA, 20 nt, synthetic construct
  source 1..20: mol_type = other RNA
cacagcagtagaacccaact

SEQ ID NO: 11599 - RNA, 20 nt, synthetic construct
  source 1..20: mol_type = other RNA
tgccctcatctgcaaggatg

SEQ ID NO: 11600 - RNA, 20 nt, synthetic construct
  source 1..20: mol_type = other RNA
tcaccctcctctgagctccc

SEQ ID NO: 11601 - RNA, 20 nt, synthetic construct
  source 1..20: mol_type = other RNA
ccctggtctgtgattgggag

SEQ ID NO: 11602 - RNA, 20 nt, synthetic construct
  source 1..20: mol_type = other RNA
gtgattgggagcagtgagcc

SEQ ID NO: 11603 - RNA, 20 nt, synthetic construct
  source 1..20: mol_type = other RNA
gccaagtgattatctctact

SEQ ID NO: 11604 - RNA, 20 nt, synthetic construct
  source 1..20: mol_type = other RNA
tgcaggaacagaagagaggc

SEQ ID NO: 11605 - RNA, 20 nt, synthetic construct
  source 1..20: mol_type = other RNA
accactttgggggtcctgca

SEQ ID NO: 11606 - RNA, 20 nt, synthetic construct
  source 1..20: mol_type = other RNA
ccgcagaaacggcatcaaga

SEQ ID NO: 11607 - RNA, 20 nt, synthetic construct
  source 1..20: mol_type = other RNA
cccaggctggagtacagtgg

SEQ ID NO: 11608 - RNA, 20 nt, synthetic construct
  source 1..20: mol_type = other RNA
tgattgagccactgtactcc

SEQ ID NO: 11609 - RNA, 20 nt, synthetic construct
  source 1..20: mol_type = other RNA
gccatgtaccatcttagtga

SEQ ID NO: 11610 - RNA, 20 nt, synthetic construct
  source 1..20: mol_type = other RNA
ctaagatggtacatggcaga

SEQ ID NO: 11611 - RNA, 20 nt, synthetic construct
  source 1..20: mol_type = other RNA
aagtcactaagatggtacat

SEQ ID NO: 11612 - RNA, 20 nt, synthetic construct
  source 1..20: mol_type = other RNA
cttcacacctacacctccag

SEQ ID NO: 11613 - RNA, 20 nt, synthetic construct
  source 1..20: mol_type = other RNA
caccagcaactcattaactc

SEQ ID NO: 11614 - RNA, 20 nt, synthetic construct
  source 1..20: mol_type = other RNA
tggcccctcctgtgggcttc

SEQ ID NO: 11615 - RNA, 20 nt, synthetic construct
  source 1..20: mol_type = other RNA
ccagcatcatgaaagaggct

SEQ ID NO: 11616 - RNA, 20 nt, synthetic construct
  source 1..20: mol_type = other RNA
gggctgcagagggaagacag

SEQ ID NO: 11617 - RNA, 20 nt, synthetic construct
  source 1..20: mol_type = other RNA
ccttcacagtgagggcttcc

SEQ ID NO: 11618 - RNA, 20 nt, synthetic construct
  source 1..20: mol_type = other RNA
tgaagaaggtaagggaggga

SEQ ID NO: 11619 - RNA, 20 nt, synthetic construct
  source 1..20: mol_type = other RNA
ccaacctcacctcctccatc

SEQ ID NO: 11620 - RNA, 20 nt, synthetic construct
  source 1..20: mol_type = other RNA
gcgggtacgtacctcagtgc

SEQ ID NO: 11621 - RNA, 20 nt, synthetic construct
  source 1..20: mol_type = other RNA
acgcaggcaaggcgagcgac

SEQ ID NO: 11622 - RNA, 20 nt, synthetic construct
  source 1..20: mol_type = other RNA
aatgggcgtgctctttccct

SEQ ID NO: 11623 - RNA, 20 nt, synthetic construct
  source 1..20: mol_type = other RNA
tgggagcccgctcgcaagga

SEQ ID NO: 11624 - RNA, 20 nt, synthetic construct
  source 1..20: mol_type = other RNA
agcagagggcgcgctaaccc

SEQ ID NO: 11625 - RNA, 20 nt, synthetic construct
  source 1..20: mol_type = other RNA
ttcatcgtccagcagagggc

SEQ ID NO: 11626 - RNA, 20 nt, synthetic construct
  source 1..20: mol_type = other RNA
tcgcccgcatttcacaggcg

SEQ ID NO: 11627 - RNA, 20 nt, synthetic construct
  source 1..20: mol_type = other RNA
cggcggggaggggagtcatc

SEQ ID NO: 11628 - RNA, 20 nt, synthetic construct
  source 1..20: mol_type = other RNA
gcggctgggctcggacccgg

SEQ ID NO: 11629 - RNA, 20 nt, synthetic construct
  source 1..20: mol_type = other RNA
tgcagggcctcgtgggccgc

SEQ ID NO: 11630 - RNA, 20 nt, synthetic construct
  source 1..20: mol_type = other RNA
ccaggcctggcctccttggg

SEQ ID NO: 11631 - RNA, 20 nt, synthetic construct
  source 1..20: mol_type = other RNA
tgatcaggttacctcagttt

SEQ ID NO: 11632 - RNA, 20 nt, synthetic construct
  source 1..20: mol_type = other RNA
acccagctcaaccccacagt

SEQ ID NO: 11633 - RNA, 20 nt, synthetic construct
  source 1..20: mol_type = other RNA
aagccttggctggggcccag

SEQ ID NO: 11634 - RNA, 20 nt, synthetic construct
  source 1..20: mol_type = other RNA
gttgaagcgagccgcctcca

SEQ ID NO: 11635 - RNA, 20 nt, synthetic construct
  source 1..20: mol_type = other RNA
ctggcctgcacacccccggg

SEQ ID NO: 11636 - RNA, 20 nt, synthetic construct
  source 1..20: mol_type = other RNA
gccatggctgcctggccagt

SEQ ID NO: 11637 - RNA, 20 nt, synthetic construct
  source 1..20: mol_type = other RNA
tctcgtcagccatggctgcc

SEQ ID NO: 11638 - RNA, 20 nt, synthetic construct
  source 1..20: mol_type = other RNA
acggcaccttctatgccatg

SEQ ID NO: 11639 - RNA, 20 nt, synthetic construct
  source 1..20: mol_type = other RNA
tggtgatcgggggcatcatc

SEQ ID NO: 11640 - RNA, 20 nt, synthetic construct
  source 1..20: mol_type = other RNA
gctggggccaggagggctgg

SEQ ID NO: 11641 - RNA, 20 nt, synthetic construct
  source 1..20: mol_type = other RNA
tgagttctagttcaagtcct

SEQ ID NO: 11642 - RNA, 20 nt, synthetic construct
  source 1..20: mol_type = other RNA
tgttccaaactctctatgac

SEQ ID NO: 11643 - RNA, 20 nt, synthetic construct
  source 1..20: mol_type = other RNA
tagagagtttggaacaggac

SEQ ID NO: 11644 - RNA, 20 nt, synthetic construct
  source 1..20: mol_type = other RNA
cccagcctctctaggcattg

SEQ ID NO: 11645 - RNA, 20 nt, synthetic construct
  source 1..20: mol_type = other RNA
cacagctggtcaggtacaga

SEQ ID NO: 11646 - RNA, 20 nt, synthetic construct
  source 1..20: mol_type = other RNA
ggtacagacccagggagaaa

SEQ ID NO: 11647 - RNA, 20 nt, synthetic construct
  source 1..20: mol_type = other RNA
gtacctgaccagctgtgtga

SEQ ID NO: 11648 - RNA, 20 nt, synthetic construct
  source 1..20: mol_type = other RNA
ttctgttcagtgctggagcg

SEQ ID NO: 11649 - RNA, 20 nt, synthetic construct
  source 1..20: mol_type = other RNA
gggctggtttgtagtcattt

SEQ ID NO: 11650 - RNA, 20 nt, synthetic construct
  source 1..20: mol_type = other RNA
tttagcaggcagtttacagt

SEQ ID NO: 11651 - RNA, 20 nt, synthetic construct
  source 1..20: mol_type = other RNA
acttgcctctgtctgtgcaa

SEQ ID NO: 11652 - RNA, 20 nt, synthetic construct
  source 1..20: mol_type = other RNA
gtgcaattccttgagcagag

SEQ ID NO: 11653 - RNA, 20 nt, synthetic construct
  source 1..20: mol_type = other RNA
ctgggagaagtccttggggc

SEQ ID NO: 11654 - RNA, 20 nt, synthetic construct
  source 1..20: mol_type = other RNA
ttggggccaaagccactcat

SEQ ID NO: 11655 - RNA, 20 nt, synthetic construct
  source 1..20: mol_type = other RNA
ccactgctattataatcctt

SEQ ID NO: 11656 - RNA, 20 nt, synthetic construct
  source 1..20: mol_type = other RNA
cacttctgtgaccttggcag

SEQ ID NO: 11657 - RNA, 20 nt, synthetic construct
  source 1..20: mol_type = other RNA
cagaagtgggacatgaagga

SEQ ID NO: 11658 - RNA, 20 nt, synthetic construct
  source 1..20: mol_type = other RNA
ctccccctcagctctgagcc

SEQ ID NO: 11659 - RNA, 20 nt, synthetic construct
  source 1..20: mol_type = other RNA
ttccccatcttctctgcttg

SEQ ID NO: 11660 - RNA, 20 nt, synthetic construct
  source 1..20: mol_type = other RNA
tggtgagagctgacagtcat

SEQ ID NO: 11661 - RNA, 20 nt, synthetic construct
  source 1..20: mol_type = other RNA
gctctcaccaagaccagaga

SEQ ID NO: 11662 - RNA, 20 nt, synthetic construct
  source 1..20: mol_type = other RNA
tctggaataatgcagaattc

SEQ ID NO: 11663 - RNA, 20 nt, synthetic construct
  source 1..20: mol_type = other RNA
gaagttccatccttaaggct

SEQ ID NO: 11664 - RNA, 20 nt, synthetic construct
  source 1..20: mol_type = other RNA
atccatatgatgaaatacta

SEQ ID NO: 11665 - RNA, 20 nt, synthetic construct
  source 1..20: mol_type = other RNA
cctcagggaattggcaaacc

SEQ ID NO: 11666 - RNA, 20 nt, synthetic construct
  source 1..20: mol_type = other RNA
actgcacagaggctgtctct

SEQ ID NO: 11667 - RNA, 20 nt, synthetic construct
  source 1..20: mol_type = other RNA
ctcctttgcttgcagatcac

SEQ ID NO: 11668 - RNA, 20 nt, synthetic construct
  source 1..20: mol_type = other RNA
ctgctgactctgactttcaa

SEQ ID NO: 11669 - RNA, 20 nt, synthetic construct
  source 1..20: mol_type = other RNA
gcagggacgaaggtgatctg

SEQ ID NO: 11670 - RNA, 20 nt, synthetic construct
  source 1..20: mol_type = other RNA
gagtcagcagggacgaaggt

SEQ ID NO: 11671 - RNA, 20 nt, synthetic construct
  source 1..20: mol_type = other RNA
cccctgactgaggagagtga

SEQ ID NO: 11672 - RNA, 20 nt, synthetic construct
  source 1..20: mol_type = other RNA
ggggagactggcctatgggg

SEQ ID NO: 11673 - RNA, 20 nt, synthetic construct
  source 1..20: mol_type = other RNA
ctgggcctcagtttcctcat

SEQ ID NO: 11674 - RNA, 20 nt, synthetic construct
  source 1..20: mol_type = other RNA
tgtcagggacgagacagtgt

SEQ ID NO: 11675 - RNA, 20 nt, synthetic construct
  source 1..20: mol_type = other RNA
gggacgagacagtgtttcgg

SEQ ID NO: 11676 - RNA, 20 nt, synthetic construct
  source 1..20: mol_type = other RNA
ctgacaagacaaagtccctg

SEQ ID NO: 11677 - RNA, 20 nt, synthetic construct
  source 1..20: mol_type = other RNA
cgtccctgacaagacaaagt

SEQ ID NO: 11678 - RNA, 20 nt, synthetic construct
  source 1..20: mol_type = other RNA
ctagccccaaacctcatggg

SEQ ID NO: 11679 - RNA, 20 nt, synthetic construct
  source 1..20: mol_type = other RNA
ccagccgccctatgtaaggc

SEQ ID NO: 11680 - RNA, 20 nt, synthetic construct
  source 1..20: mol_type = other RNA
taggcggcttcctcccacag

SEQ ID NO: 11681 - RNA, 20 nt, synthetic construct
  source 1..20: mol_type = other RNA
ggcaggctctggtcataggc

SEQ ID NO: 11682 - RNA, 20 nt, synthetic construct
  source 1..20: mol_type = other RNA
tgagctacagtgaggaccac

SEQ ID NO: 11683 - RNA, 20 nt, synthetic construct
  source 1..20: mol_type = other RNA
tcactgtagctcatgacttt

SEQ ID NO: 11684 - RNA, 20 nt, synthetic construct
  source 1..20: mol_type = other RNA
ccagggccaccttctcctcc

SEQ ID NO: 11685 - RNA, 20 nt, synthetic construct
  source 1..20: mol_type = other RNA
tccacaagggctcagacgag

SEQ ID NO: 11686 - RNA, 20 nt, synthetic construct
  source 1..20: mol_type = other RNA
gagcccttgtggatgaccac

SEQ ID NO: 11687 - RNA, 20 nt, synthetic construct
  source 1..20: mol_type = other RNA
ttccccttcactctcgtctg

SEQ ID NO: 11688 - RNA, 20 nt, synthetic construct
  source 1..20: mol_type = other RNA
cacaccctccactgccctct

SEQ ID NO: 11689 - RNA, 20 nt, synthetic construct
  source 1..20: mol_type = other RNA
gccacatctgccacatctca

SEQ ID NO: 11690 - RNA, 20 nt, synthetic construct
  source 1..20: mol_type = other RNA
ggcctcagttcaaaccccag

SEQ ID NO: 11691 - RNA, 20 nt, synthetic construct
  source 1..20: mol_type = other RNA
caaccctcaacattcctggg

SEQ ID NO: 11692 - RNA, 20 nt, synthetic construct
  source 1..20: mol_type = other RNA
ctgaatgcttgtcgtgagta

SEQ ID NO: 11693 - RNA, 20 nt, synthetic construct
  source 1..20: mol_type = other RNA
tgagtagcagggggccagga

SEQ ID NO: 11694 - RNA, 20 nt, synthetic construct
  source 1..20: mol_type = other RNA
tctggctcctggccccctgc

SEQ ID NO: 11695 - RNA, 20 nt, synthetic construct
  source 1..20: mol_type = other RNA
gctgctgacctgctctgtga

SEQ ID NO: 11696 - RNA, 20 nt, synthetic construct
  source 1..20: mol_type = other RNA
gcagcagacccaaatttgaa

SEQ ID NO: 11697 - RNA, 20 nt, synthetic construct
  source 1..20: mol_type = other RNA
cagagcaggtcagcagcaga

SEQ ID NO: 11698 - RNA, 20 nt, synthetic construct
  source 1..20: mol_type = other RNA
gtttgtgaactgagctcctt

SEQ ID NO: 11699 - RNA, 20 nt, synthetic construct
  source 1..20: mol_type = other RNA
aatgagggaggcaaagacac

SEQ ID NO: 11700 - RNA, 20 nt, synthetic construct
  source 1..20: mol_type = other RNA
ttgcctccctcattggactc

SEQ ID NO: 11701 - RNA, 20 nt, synthetic construct
  source 1..20: mol_type = other RNA
ccgggtgtctttgcctccct

SEQ ID NO: 11702 - RNA, 20 nt, synthetic construct
  source 1..20: mol_type = other RNA
ctcatctacttctccaatta

SEQ ID NO: 11703 - RNA, 20 nt, synthetic construct
  source 1..20: mol_type = other RNA
tgcagctagcggctggaatg

SEQ ID NO: 11704 - RNA, 20 nt, synthetic construct
  source 1..20: mol_type = other RNA
acattccagccgctagctgc

SEQ ID NO: 11705 - RNA, 20 nt, synthetic construct
  source 1..20: mol_type = other RNA
gaatgcctgggtccacattc

SEQ ID NO: 11706 - RNA, 20 nt, synthetic construct
  source 1..20: mol_type = other RNA
ttgtccctgcagccccctgg

SEQ ID NO: 11707 - RNA, 20 nt, synthetic construct
  source 1..20: mol_type = other RNA
ctgcagccccctggcctgtc

SEQ ID NO: 11708 - RNA, 20 nt, synthetic construct
  source 1..20: mol_type = other RNA
ccagggccctgcccccttgg

SEQ ID NO: 11709 - RNA, 20 nt, synthetic construct
  source 1..20: mol_type = other RNA
tcttggaaggaagccaaggg

SEQ ID NO: 11710 - RNA, 20 nt, synthetic construct
  source 1..20: mol_type = other RNA
aggtcatcttggaaggaagc

SEQ ID NO: 11711 - RNA, 20 nt, synthetic construct
  source 1..20: mol_type = other RNA
atgtccaggtcatcttggaa

SEQ ID NO: 11712 - RNA, 20 nt, synthetic construct
  source 1..20: mol_type = other RNA
tgtggagatgcattggggct

SEQ ID NO: 11713 - RNA, 20 nt, synthetic construct
  source 1..20: mol_type = other RNA
agcgggcacctgcagccctg

SEQ ID NO: 11714 - RNA, 20 nt, synthetic construct
  source 1..20: mol_type = other RNA
tggaagcggtccagcgggca

SEQ ID NO: 11715 - RNA, 20 nt, synthetic construct
  source 1..20: mol_type = other RNA
ttgggtaccgctgccagttg

SEQ ID NO: 11716 - RNA, 20 nt, synthetic construct
  source 1..20: mol_type = other RNA
gaagcctccttctcctccac

SEQ ID NO: 11717 - RNA, 20 nt, synthetic construct
  source 1..20: mol_type = other RNA
tcctcttccttctcaggttc

SEQ ID NO: 11718 - RNA, 20 nt, synthetic construct
  source 1..20: mol_type = other RNA
ccggctccatctggcagccc

SEQ ID NO: 11719 - RNA, 20 nt, synthetic construct
  source 1..20: mol_type = other RNA
gggaggaggtccccggctcc

SEQ ID NO: 11720 - RNA, 20 nt, synthetic construct
  source 1..20: mol_type = other RNA
ggctcaaaacccagctcctt

SEQ ID NO: 11721 - RNA, 20 nt, synthetic construct
  source 1..20: mol_type = other RNA
ggaactgctgctgacccctg

SEQ ID NO: 11722 - RNA, 20 nt, synthetic construct
  source 1..20: mol_type = other RNA
ttggccaacctttgaaggca

SEQ ID NO: 11723 - RNA, 20 nt, synthetic construct
  source 1..20: mol_type = other RNA
gctttgggggaaggtggaaa

SEQ ID NO: 11724 - RNA, 20 nt, synthetic construct
  source 1..20: mol_type = other RNA
tggtttgaggtagtgttact

SEQ ID NO: 11725 - RNA, 20 nt, synthetic construct
  source 1..20: mol_type = other RNA
gagaccttcacctgggctat

SEQ ID NO: 11726 - RNA, 20 nt, synthetic construct
  source 1..20: mol_type = other RNA
ctgactcccaggtggcccag

SEQ ID NO: 11727 - RNA, 20 nt, synthetic construct
  source 1..20: mol_type = other RNA
tggcctagggaaggagatgc

SEQ ID NO: 11728 - RNA, 20 nt, synthetic construct
  source 1..20: mol_type = other RNA
tggccctgggaacacacttc

SEQ ID NO: 11729 - RNA, 20 nt, synthetic construct
  source 1..20: mol_type = other RNA
tttctgcctctgcagtgaag

SEQ ID NO: 11730 - RNA, 20 nt, synthetic construct
  source 1..20: mol_type = other RNA
tgactcaggacaggagttcc

SEQ ID NO: 11731 - RNA, 20 nt, synthetic construct
  source 1..20: mol_type = other RNA
tgacagcagagagggtgtac

SEQ ID NO: 11732 - RNA, 20 nt, synthetic construct
  source 1..20: mol_type = other RNA
tgagtcatgacagcagagag

SEQ ID NO: 11733 - RNA, 20 nt, synthetic construct
  source 1..20: mol_type = other RNA
cagctgagtcttcggatgag

SEQ ID NO: 11734 - RNA, 20 nt, synthetic construct
  source 1..20: mol_type = other RNA
tcggatgaggtgaggggtag

SEQ ID NO: 11735 - RNA, 20 nt, synthetic construct
  source 1..20: mol_type = other RNA
gcactaagggctaaaataaa

SEQ ID NO: 11736 - RNA, 20 nt, synthetic construct
  source 1..20: mol_type = other RNA
tcttcattcacctgcaaatt

SEQ ID NO: 11737 - RNA, 20 nt, synthetic construct
  source 1..20: mol_type = other RNA
ggcgtaaggcctcacgtatc

SEQ ID NO: 11738 - RNA, 20 nt, synthetic construct
  source 1..20: mol_type = other RNA
tgccactgcagtgagggctt

SEQ ID NO: 11739 - RNA, 20 nt, synthetic construct
  source 1..20: mol_type = other RNA
aaagccactgcggttgtggt

SEQ ID NO: 11740 - RNA, 20 nt, synthetic construct
  source 1..20: mol_type = other RNA
caccatctcactccactacc

SEQ ID NO: 11741 - RNA, 20 nt, synthetic construct
  source 1..20: mol_type = other RNA
ccctggctcttgctgcatga

SEQ ID NO: 11742 - RNA, 20 nt, synthetic construct
  source 1..20: mol_type = other RNA
ccccatcatgcagcaagagc

SEQ ID NO: 11743 - RNA, 20 nt, synthetic construct
  source 1..20: mol_type = other RNA
cggttgacaccgactgcctc

SEQ ID NO: 11744 - RNA, 20 nt, synthetic construct
  source 1..20: mol_type = other RNA
accgggaccttcctgggcag

SEQ ID NO: 11745 - RNA, 20 nt, synthetic construct
  source 1..20: mol_type = other RNA
gtgtcaaccgggaccttcct

SEQ ID NO: 11746 - RNA, 20 nt, synthetic construct
  source 1..20: mol_type = other RNA
cagagtaggtaaggtaacat

SEQ ID NO: 11747 - RNA, 20 nt, synthetic construct
  source 1..20: mol_type = other RNA
aaggtcacagagtaggtaag

SEQ ID NO: 11748 - RNA, 20 nt, synthetic construct
  source 1..20: mol_type = other RNA
ggttgcctccgtagccctca

SEQ ID NO: 11749 - RNA, 20 nt, synthetic construct
  source 1..20: mol_type = other RNA
tttgcacatgagaaagctga

SEQ ID NO: 11750 - RNA, 20 nt, synthetic construct
  source 1..20: mol_type = other RNA
catcaaacacccccatcact

SEQ ID NO: 11751 - RNA, 20 nt, synthetic construct
  source 1..20: mol_type = other RNA
atgccctgcagccaaagacc

SEQ ID NO: 11752 - RNA, 20 nt, synthetic construct
  source 1..20: mol_type = other RNA
ttggctgcagggcattgaca

SEQ ID NO: 11753 - RNA, 20 nt, synthetic construct
  source 1..20: mol_type = other RNA
ctgaaagaggtattagaaag

SEQ ID NO: 11754 - RNA, 20 nt, synthetic construct
  source 1..20: mol_type = other RNA
ctctcctgtcaggttggagg

SEQ ID NO: 11755 - RNA, 20 nt, synthetic construct
  source 1..20: mol_type = other RNA
ggttggagggactctggaag

SEQ ID NO: 11756 - RNA, 20 nt, synthetic construct
  source 1..20: mol_type = other RNA
ctccaacctgacaggagagt

SEQ ID NO: 11757 - RNA, 20 nt, synthetic construct
  source 1..20: mol_type = other RNA
gcagagcccaggttccctgc

SEQ ID NO: 11758 - RNA, 20 nt, synthetic construct
  source 1..20: mol_type = other RNA
tggcgagcggtcggcagagc

SEQ ID NO: 11759 - RNA, 20 nt, synthetic construct
  source 1..20: mol_type = other RNA
accccacattgcaaatgttt

SEQ ID NO: 11760 - RNA, 20 nt, synthetic construct
  source 1..20: mol_type = other RNA
acagatcggtcccccagggc

SEQ ID NO: 11761 - RNA, 20 nt, synthetic construct
  source 1..20: mol_type = other RNA
ttctgattctggagcctggg

SEQ ID NO: 11762 - RNA, 20 nt, synthetic construct
  source 1..20: mol_type = other RNA
acatttatgcagtggggagg

SEQ ID NO: 11763 - RNA, 20 nt, synthetic construct
  source 1..20: mol_type = other RNA
ccctccacactagcacaggg

SEQ ID NO: 11764 - RNA, 20 nt, synthetic construct
  source 1..20: mol_type = other RNA
tggaagatgttgcagggggg

SEQ ID NO: 11765 - RNA, 20 nt, synthetic construct
  source 1..20: mol_type = other RNA
cttcccccagtacctagcac

SEQ ID NO: 11766 - RNA, 20 nt, synthetic construct
  source 1..20: mol_type = other RNA
gatgcatgtctcttccccca

SEQ ID NO: 11767 - RNA, 20 nt, synthetic construct
  source 1..20: mol_type = other RNA
tgggggaacctctactaccc

SEQ ID NO: 11768 - RNA, 20 nt, synthetic construct
  source 1..20: mol_type = other RNA
gaaagagctctgttcctcca

SEQ ID NO: 11769 - RNA, 20 nt, synthetic construct
  source 1..20: mol_type = other RNA
atatattttgatgtggacag

SEQ ID NO: 11770 - RNA, 20 nt, synthetic construct
  source 1..20: mol_type = other RNA
acatcaaaatatatagactc

SEQ ID NO: 11771 - RNA, 20 nt, synthetic construct
  source 1..20: mol_type = other RNA
gttacagcatgcatgctgtt

SEQ ID NO: 11772 - RNA, 20 nt, synthetic construct
  source 1..20: mol_type = other RNA
tcactcacaaacaaaatcaa

SEQ ID NO: 11773 - RNA, 20 nt, synthetic construct
  source 1..20: mol_type = other RNA
atgaattgtgattggtccaa

SEQ ID NO: 11774 - RNA, 20 nt, synthetic construct
  source 1..20: mol_type = other RNA
aaagccaatcatgacaatcc

SEQ ID NO: 11775 - RNA, 20 nt, synthetic construct
  source 1..20: mol_type = other RNA
tgattggctttggaccaatc

SEQ ID NO: 11776 - RNA, 20 nt, synthetic construct
  source 1..20: mol_type = other RNA
tgagatcgagttctggccag

SEQ ID NO: 11777 - RNA, 20 nt, synthetic construct
  source 1..20: mol_type = other RNA
tactggccagaactcgatct

SEQ ID NO: 11778 - RNA, 20 nt, synthetic construct
  source 1..20: mol_type = other RNA
ctttctgaagtttttgcttt

SEQ ID NO: 11779 - RNA, 20 nt, synthetic construct
  source 1..20: mol_type = other RNA
cttctgcatttttattataa

SEQ ID NO: 11780 - RNA, 20 nt, synthetic construct
  source 1..20: mol_type = other RNA
tgcagtcatgagggaaattc

SEQ ID NO: 11781 - RNA, 20 nt, synthetic construct
  source 1..20: mol_type = other RNA
tgagggaaattccaagagat

SEQ ID NO: 11782 - RNA, 20 nt, synthetic construct
  source 1..20: mol_type = other RNA
agcatctctgtgaatctctt

SEQ ID NO: 11783 - RNA, 20 nt, synthetic construct
  source 1..20: mol_type = other RNA
cgtggcacctgtattggcta

SEQ ID NO: 11784 - RNA, 20 nt, synthetic construct
  source 1..20: mol_type = other RNA
tctgcatgaaaatgaccttg

SEQ ID NO: 11785 - RNA, 20 nt, synthetic construct
  source 1..20: mol_type = other RNA
ttttcatgcagatgacctgg

SEQ ID NO: 11786 - RNA, 20 nt, synthetic construct
  source 1..20: mol_type = other RNA
ccacgaggtccccaggcctg

SEQ ID NO: 11787 - RNA, 20 nt, synthetic construct
  source 1..20: mol_type = other RNA
gatctccaaaacccagccca

SEQ ID NO: 11788 - RNA, 20 nt, synthetic construct
  source 1..20: mol_type = other RNA
gccatctcagccagggagga

SEQ ID NO: 11789 - RNA, 20 nt, synthetic construct
  source 1..20: mol_type = other RNA
gggtgttaatggtgcagaga

SEQ ID NO: 11790 - RNA, 20 nt, synthetic construct
  source 1..20: mol_type = other RNA
ccacctccacttgccctggg

SEQ ID NO: 11791 - RNA, 20 nt, synthetic construct
  source 1..20: mol_type = other RNA
agggtgaaaggaaagaatcc

SEQ ID NO: 11792 - RNA, 20 nt, synthetic construct
  source 1..20: mol_type = other RNA
tttggatccaaatggccagt

SEQ ID NO: 11793 - RNA, 20 nt, synthetic construct
  source 1..20: mol_type = other RNA
gggtgacccagttgggtatt

SEQ ID NO: 11794 - RNA, 20 nt, synthetic construct
  source 1..20: mol_type = other RNA
ccccgactggccatttggat

SEQ ID NO: 11795 - RNA, 20 nt, synthetic construct
  source 1..20: mol_type = other RNA
gatggcagccccactcctcc

SEQ ID NO: 11796 - RNA, 20 nt, synthetic construct
  source 1..20: mol_type = other RNA
ttcctccccctccatgcttg

SEQ ID NO: 11797 - RNA, 20 nt, synthetic construct
  source 1..20: mol_type = other RNA
ggactttctaaagcagtttt

SEQ ID NO: 11798 - RNA, 20 nt, synthetic construct
  source 1..20: mol_type = other RNA
tgacatgaggcaagcatgga

SEQ ID NO: 11799 - RNA, 20 nt, synthetic construct
  source 1..20: mol_type = other RNA
aacaagatagcacatctaaa

SEQ ID NO: 11800 - RNA, 20 nt, synthetic construct
  source 1..20: mol_type = other RNA
caccgtgaatttgtagcaga

SEQ ID NO: 11801 - RNA, 20 nt, synthetic construct
  source 1..20: mol_type = other RNA
tgtcccatctgctgccaagg

SEQ ID NO: 11802 - RNA, 20 nt, synthetic construct
  source 1..20: mol_type = other RNA
catctgctgccaaggcctag

SEQ ID NO: 11803 - RNA, 20 nt, synthetic construct
  source 1..20: mol_type = other RNA
ccacccctccagcctgtgct

SEQ ID NO: 11804 - RNA, 20 nt, synthetic construct
  source 1..20: mol_type = other RNA
ccaggctggaccccaccaca

SEQ ID NO: 11805 - RNA, 20 nt, synthetic construct
  source 1..20: mol_type = other RNA
agcctggagacagtaccctg

SEQ ID NO: 11806 - RNA, 20 nt, synthetic construct
  source 1..20: mol_type = other RNA
ggagagagtggttttagagc

SEQ ID NO: 11807 - RNA, 20 nt, synthetic construct
  source 1..20: mol_type = other RNA
aattcgctttggtctggaga

SEQ ID NO: 11808 - RNA, 20 nt, synthetic construct
  source 1..20: mol_type = other RNA
cagctgtaggagctcctggt

SEQ ID NO: 11809 - RNA, 20 nt, synthetic construct
  source 1..20: mol_type = other RNA
agcagaagagattgtcacat

SEQ ID NO: 11810 - RNA, 20 nt, synthetic construct
  source 1..20: mol_type = other RNA
catagaggactcccttggca

SEQ ID NO: 11811 - RNA, 20 nt, synthetic construct
  source 1..20: mol_type = other RNA
tctatgtgacaatctcttct

SEQ ID NO: 11812 - RNA, 20 nt, synthetic construct
  source 1..20: mol_type = other RNA
cctcctccaggcagcactcc

SEQ ID NO: 11813 - RNA, 20 nt, synthetic construct
  source 1..20: mol_type = other RNA
tgagaattatcaggcaaaga

SEQ ID NO: 11814 - RNA, 20 nt, synthetic construct
  source 1..20: mol_type = other RNA
cccagctccactctgcagcc

SEQ ID NO: 11815 - RNA, 20 nt, synthetic construct
  source 1..20: mol_type = other RNA
aggtcacccagctccactct

SEQ ID NO: 11816 - RNA, 20 nt, synthetic construct
  source 1..20: mol_type = other RNA
tgctagtgtttctccaagca

SEQ ID NO: 11817 - RNA, 20 nt, synthetic construct
  source 1..20: mol_type = other RNA
aaggccacctcagtcctgct

SEQ ID NO: 11818 - RNA, 20 nt, synthetic construct
  source 1..20: mol_type = other RNA
ggggtggaggcagaggtgga

SEQ ID NO: 11819 - RNA, 20 nt, synthetic construct
  source 1..20: mol_type = other RNA
agcttctgcagctcttccta

SEQ ID NO: 11820 - RNA, 20 nt, synthetic construct
  source 1..20: mol_type = other RNA
aagagggtccagcttctgca

SEQ ID NO: 11821 - RNA, 20 nt, synthetic construct
  source 1..20: mol_type = other RNA
ccactgacacattttatcct

SEQ ID NO: 11822 - RNA, 20 nt, synthetic construct
  source 1..20: mol_type = other RNA
gtggggacaggggatgggca

SEQ ID NO: 11823 - RNA, 20 nt, synthetic construct
  source 1..20: mol_type = other RNA
atcttgttcactgctgtacc

SEQ ID NO: 11824 - RNA, 20 nt, synthetic construct
  source 1..20: mol_type = other RNA
gtaacatggaaggtgatcaa

SEQ ID NO: 11825 - RNA, 20 nt, synthetic construct
  source 1..20: mol_type = other RNA
ccctcttgtcacccaggatg

SEQ ID NO: 11826 - RNA, 20 nt, synthetic construct
  source 1..20: mol_type = other RNA
cccaggatgaagtgcaatgg

SEQ ID NO: 11827 - RNA, 20 nt, synthetic construct
  source 1..20: mol_type = other RNA
ctactaaaaacacaaaatta

SEQ ID NO: 11828 - RNA, 20 nt, synthetic construct
  source 1..20: mol_type = other RNA
ggctggtcttgaactcctga

SEQ ID NO: 11829 - RNA, 20 nt, synthetic construct
  source 1..20: mol_type = other RNA
tgaactcctgacttcaggtg

SEQ ID NO: 11830 - RNA, 20 nt, synthetic construct
  source 1..20: mol_type = other RNA
ggagttcaagaccagcctga

SEQ ID NO: 11831 - RNA, 20 nt, synthetic construct
  source 1..20: mol_type = other RNA
ctcttttgtacacatcaagg

SEQ ID NO: 11832 - RNA, 20 nt, synthetic construct
  source 1..20: mol_type = other RNA
gcctggctctctctgtctct

SEQ ID NO: 11833 - RNA, 20 nt, synthetic construct
  source 1..20: mol_type = other RNA
gagaacagcaacagctcttc

SEQ ID NO: 11834 - RNA, 20 nt, synthetic construct
  source 1..20: mol_type = other RNA
ccactccctgccggcttaaa

SEQ ID NO: 11835 - RNA, 20 nt, synthetic construct
  source 1..20: mol_type = other RNA
tcctggcacctgccacaggc

SEQ ID NO: 11836 - RNA, 20 nt, synthetic construct
  source 1..20: mol_type = other RNA
gccacttcatggagaaaagg

SEQ ID NO: 11837 - RNA, 20 nt, synthetic construct
  source 1..20: mol_type = other RNA
ccaccctctcctctcctccc

SEQ ID NO: 11838 - RNA, 20 nt, synthetic construct
  source 1..20: mol_type = other RNA
tgaccctcttttgttcagaa

SEQ ID NO: 11839 - RNA, 20 nt, synthetic construct
  source 1..20: mol_type = other RNA
tgaccagcacgccggcctca

SEQ ID NO: 11840 - RNA, 20 nt, synthetic construct
  source 1..20: mol_type = other RNA
cctaacctcaggagagggcc

SEQ ID NO: 11841 - RNA, 20 nt, synthetic construct
  source 1..20: mol_type = other RNA
ccagctgggccatgcactgc

SEQ ID NO: 11842 - RNA, 20 nt, synthetic construct
  source 1..20: mol_type = other RNA
agttataatggtggtaggaa

SEQ ID NO: 11843 - RNA, 20 nt, synthetic construct
  source 1..20: mol_type = other RNA
gatgggcactgaatccgggc

SEQ ID NO: 11844 - RNA, 20 nt, synthetic construct
  source 1..20: mol_type = other RNA
cttctgtgagacttggctcc

SEQ ID NO: 11845 - RNA, 20 nt, synthetic construct
  source 1..20: mol_type = other RNA
cacagaagggacaggctagg

SEQ ID NO: 11846 - RNA, 20 nt, synthetic construct
  source 1..20: mol_type = other RNA
cctgtgctctcatctgcctc

SEQ ID NO: 11847 - RNA, 20 nt, synthetic construct
  source 1..20: mol_type = other RNA
acagggaggcagatgagagc

SEQ ID NO: 11848 - RNA, 20 nt, synthetic construct
  source 1..20: mol_type = other RNA
tctgagcccacggcctgccc

SEQ ID NO: 11849 - RNA, 20 nt, synthetic construct
  source 1..20: mol_type = other RNA
agctgggcaaggctgctgct

SEQ ID NO: 11850 - RNA, 20 nt, synthetic construct
  source 1..20: mol_type = other RNA
ctctctccctattccttcct

SEQ ID NO: 11851 - RNA, 20 nt, synthetic construct
  source 1..20: mol_type = other RNA
tccaaatcctgctccagcac

SEQ ID NO: 11852 - RNA, 20 nt, synthetic construct
  source 1..20: mol_type = other RNA
ctttctggccttgactggaa

SEQ ID NO: 11853 - RNA, 20 nt, synthetic construct
  source 1..20: mol_type = other RNA
aggccagaaagggaccgaaa

SEQ ID NO: 11854 - RNA, 20 nt, synthetic construct
  source 1..20: mol_type = other RNA
cccaaggacactgctgccgt

SEQ ID NO: 11855 - RNA, 20 nt, synthetic construct
  source 1..20: mol_type = other RNA
ttgggggacaggggccttcc

SEQ ID NO: 11856 - RNA, 20 nt, synthetic construct
  source 1..20: mol_type = other RNA
ctgcagtcctttccccccgc

SEQ ID NO: 11857 - RNA, 20 nt, synthetic construct
  source 1..20: mol_type = other RNA
tttccccccgcctgagaggg

SEQ ID NO: 11858 - RNA, 20 nt, synthetic construct
  source 1..20: mol_type = other RNA
ccttgctctcagtgccccac

SEQ ID NO: 11859 - RNA, 20 nt, synthetic construct
  source 1..20: mol_type = other RNA
ttctctcctccataaacgca

SEQ ID NO: 11860 - RNA, 20 nt, synthetic construct
  source 1..20: mol_type = other RNA
tgcgccacacagcaatgttt

SEQ ID NO: 11861 - RNA, 20 nt, synthetic construct
  source 1..20: mol_type = other RNA
ttgcctgaaacattgctgtg

SEQ ID NO: 11862 - RNA, 20 nt, synthetic construct
  source 1..20: mol_type = other RNA
gtcgttgcctgaaacattgc

SEQ ID NO: 11863 - RNA, 20 nt, synthetic construct
  source 1..20: mol_type = other RNA
tgtatgtggtctgtcgttgc

SEQ ID NO: 11864 - RNA, 20 nt, synthetic construct
  source 1..20: mol_type = other RNA
cctcgcttagagacgtcata

SEQ ID NO: 11865 - RNA, 20 nt, synthetic construct
  source 1..20: mol_type = other RNA
ctaagcgaggtgacaggagt

SEQ ID NO: 11866 - RNA, 20 nt, synthetic construct
  source 1..20: mol_type = other RNA
tagctgtcaggcctctgagc

SEQ ID NO: 11867 - RNA, 20 nt, synthetic construct
  source 1..20: mol_type = other RNA
ggcctctgagcccaagccaa

SEQ ID NO: 11868 - RNA, 20 nt, synthetic construct
  source 1..20: mol_type = other RNA
caggggatgcgatggcttgg

SEQ ID NO: 11869 - RNA, 20 nt, synthetic construct
  source 1..20: mol_type = other RNA
tcagttaaggtggggcaggg

SEQ ID NO: 11870 - RNA, 20 nt, synthetic construct
  source 1..20: mol_type = other RNA
ttgccttaactgatgacatt

SEQ ID NO: 11871 - RNA, 20 nt, synthetic construct
  source 1..20: mol_type = other RNA
tcagttaaggcaaggaccag

SEQ ID NO: 11872 - RNA, 20 nt, synthetic construct
  source 1..20: mol_type = other RNA
ttttcctggttcatcctggc

SEQ ID NO: 11873 - RNA, 20 nt, synthetic construct
  source 1..20: mol_type = other RNA
caaggtgctcagtggaggtg

SEQ ID NO: 11874 - RNA, 20 nt, synthetic construct
  source 1..20: mol_type = other RNA
aagggggtttgttctctggc

SEQ ID NO: 11875 - RNA, 20 nt, synthetic construct
  source 1..20: mol_type = other RNA
gcgaagggagataagggtag

SEQ ID NO: 11876 - RNA, 20 nt, synthetic construct
  source 1..20: mol_type = other RNA
aaaaagagagtcagcgaagg

SEQ ID NO: 11877 - RNA, 20 nt, synthetic construct
  source 1..20: mol_type = other RNA
cttcacacggatgcacatgt

SEQ ID NO: 11878 - RNA, 20 nt, synthetic construct
  source 1..20: mol_type = other RNA
cccgatccgagtaacggcac

SEQ ID NO: 11879 - RNA, 20 nt, synthetic construct
  source 1..20: mol_type = other RNA
tcctgctctttgctccatga

SEQ ID NO: 11880 - RNA, 20 nt, synthetic construct
  source 1..20: mol_type = other RNA
taggtggatctttctcatgg

SEQ ID NO: 11881 - RNA, 20 nt, synthetic construct
  source 1..20: mol_type = other RNA
tcagaccgaccagcccaaga

SEQ ID NO: 11882 - RNA, 20 nt, synthetic construct
  source 1..20: mol_type = other RNA
gaggacctgaggtcgtaggt

SEQ ID NO: 11883 - RNA, 20 nt, synthetic construct
  source 1..20: mol_type = other RNA
gtctgaggacctgaggtcgt

SEQ ID NO: 11884 - RNA, 20 nt, synthetic construct
  source 1..20: mol_type = other RNA
ggtaagctgcctctttttac

SEQ ID NO: 11885 - RNA, 20 nt, synthetic construct
  source 1..20: mol_type = other RNA
ctaccaaaaaatgaaagaaa

SEQ ID NO: 11886 - RNA, 20 nt, synthetic construct
  source 1..20: mol_type = other RNA
cttttgtctctaccaaaaaa

SEQ ID NO: 11887 - RNA, 20 nt, synthetic construct
  source 1..20: mol_type = other RNA
cggactgggaaggcagcctt

SEQ ID NO: 11888 - RNA, 20 nt, synthetic construct
  source 1..20: mol_type = other RNA
gtgaccggcaccggggtttt

SEQ ID NO: 11889 - RNA, 20 nt, synthetic construct
  source 1..20: mol_type = other RNA
gaccacgcagggacgcctgc

SEQ ID NO: 11890 - RNA, 20 nt, synthetic construct
  source 1..20: mol_type = other RNA
gacacccttgaaacgtgagt

SEQ ID NO: 11891 - RNA, 20 nt, synthetic construct
  source 1..20: mol_type = other RNA
ctgcgtggtctgacaccctt

SEQ ID NO: 11892 - RNA, 20 nt, synthetic construct
  source 1..20: mol_type = other RNA
ttcacccttagcggcaagtc

SEQ ID NO: 11893 - RNA, 20 nt, synthetic construct
  source 1..20: mol_type = other RNA
cgctttcctagggggcaagg

SEQ ID NO: 11894 - RNA, 20 nt, synthetic construct
  source 1..20: mol_type = other RNA
ttgccccctaggaaagcggg

SEQ ID NO: 11895 - RNA, 20 nt, synthetic construct
  source 1..20: mol_type = other RNA
gggtgcggaaataagggatt

SEQ ID NO: 11896 - RNA, 20 nt, synthetic construct
  source 1..20: mol_type = other RNA
caaccccctctctgcttttc

SEQ ID NO: 11897 - RNA, 20 nt, synthetic construct
  source 1..20: mol_type = other RNA
ctacgctctcttttctcagg

SEQ ID NO: 11898 - RNA, 20 nt, synthetic construct
  source 1..20: mol_type = other RNA
ttaagaacttaaaacctctt

SEQ ID NO: 11899 - RNA, 20 nt, synthetic construct
  source 1..20: mol_type = other RNA
ggtgtgagttgaagaggttt

SEQ ID NO: 11900 - RNA, 20 nt, synthetic construct
  source 1..20: mol_type = other RNA
agtttgtattggggccaagt

SEQ ID NO: 11901 - RNA, 20 nt, synthetic construct
  source 1..20: mol_type = other RNA
tgtaggatgcagaaatcaaa

SEQ ID NO: 11902 - RNA, 20 nt, synthetic construct
  source 1..20: mol_type = other RNA
aaaaatgggcaaatggtctg

SEQ ID NO: 11903 - RNA, 20 nt, synthetic construct
  source 1..20: mol_type = other RNA
gaggtgccttacgtccaggc

SEQ ID NO: 11904 - RNA, 20 nt, synthetic construct
  source 1..20: mol_type = other RNA
aggcatttttcacacttcgt

SEQ ID NO: 11905 - RNA, 20 nt, synthetic construct
  source 1..20: mol_type = other RNA
cctcagtcccaaccccaagc

SEQ ID NO: 11906 - RNA, 20 nt, synthetic construct
  source 1..20: mol_type = other RNA
caaccccaagcgtcgctgag

SEQ ID NO: 11907 - RNA, 20 nt, synthetic construct
  source 1..20: mol_type = other RNA
ctgagtctttccagtcttcc

SEQ ID NO: 11908 - RNA, 20 nt, synthetic construct
  source 1..20: mol_type = other RNA
ttccagtcttccttttctac

SEQ ID NO: 11909 - RNA, 20 nt, synthetic construct
  source 1..20: mol_type = other RNA
tccttttctacagacccatc

SEQ ID NO: 11910 - RNA, 20 nt, synthetic construct
  source 1..20: mol_type = other RNA
gtagaaaaggaagactggaa

SEQ ID NO: 11911 - RNA, 20 nt, synthetic construct
  source 1..20: mol_type = other RNA
gatgggtctgtagaaaagga

SEQ ID NO: 11912 - RNA, 20 nt, synthetic construct
  source 1..20: mol_type = other RNA
caattcttcctcagcctccg

SEQ ID NO: 11913 - RNA, 20 nt, synthetic construct
  source 1..20: mol_type = other RNA
cggaacgaaactgtgagccg

SEQ ID NO: 11914 - RNA, 20 nt, synthetic construct
  source 1..20: mol_type = other RNA
aggttaatgctcctttttct

SEQ ID NO: 11915 - RNA, 20 nt, synthetic construct
  source 1..20: mol_type = other RNA
tgaactgggctggattttta

SEQ ID NO: 11916 - RNA, 20 nt, synthetic construct
  source 1..20: mol_type = other RNA
cagggttgctgccaaacgag

SEQ ID NO: 11917 - RNA, 20 nt, synthetic construct
  source 1..20: mol_type = other RNA
agggctgtaaagtgtctcag

SEQ ID NO: 11918 - RNA, 20 nt, synthetic construct
  source 1..20: mol_type = other RNA
aagggccgtcttattctcaa

SEQ ID NO: 11919 - RNA, 20 nt, synthetic construct
  source 1..20: mol_type = other RNA
tattctcaatactcatttta

SEQ ID NO: 11920 - RNA, 20 nt, synthetic construct
  source 1..20: mol_type = other RNA
ggagtggattgggtaataaa

SEQ ID NO: 11921 - RNA, 20 nt, synthetic construct
  source 1..20: mol_type = other RNA
cacagtggaggcaaggaatt

SEQ ID NO: 11922 - RNA, 20 nt, synthetic construct
  source 1..20: mol_type = other RNA
catctgtgtgggaccccact

SEQ ID NO: 11923 - RNA, 20 nt, synthetic construct
  source 1..20: mol_type = other RNA
cacacagatgggacgcggct

SEQ ID NO: 11924 - RNA, 20 nt, synthetic construct
  source 1..20: mol_type = other RNA
gattttcagtggggtcccac

SEQ ID NO: 11925 - RNA, 20 nt, synthetic construct
  source 1..20: mol_type = other RNA
gagagccttgggccagagtt

SEQ ID NO: 11926 - RNA, 20 nt, synthetic construct
  source 1..20: mol_type = other RNA
gtcagagagccttgggccag

SEQ ID NO: 11927 - RNA, 20 nt, synthetic construct
  source 1..20: mol_type = other RNA
tcagccgctaagccgagaag

SEQ ID NO: 11928 - RNA, 20 nt, synthetic construct
  source 1..20: mol_type = other RNA
gtcttcagccgctaagccga

SEQ ID NO: 11929 - RNA, 20 nt, synthetic construct
  source 1..20: mol_type = other RNA
gggggcttccgaggcgatcg

SEQ ID NO: 11930 - RNA, 20 nt, synthetic construct
  source 1..20: mol_type = other RNA
gtgatggtctgggggcttcc

SEQ ID NO: 11931 - RNA, 20 nt, synthetic construct
  source 1..20: mol_type = other RNA
ccttcttaatcaatacggag

SEQ ID NO: 11932 - RNA, 20 nt, synthetic construct
  source 1..20: mol_type = other RNA
atacccacaacagttatgga

SEQ ID NO: 11933 - RNA, 20 nt, synthetic construct
  source 1..20: mol_type = other RNA
aagttggcaccagagttggg

SEQ ID NO: 11934 - RNA, 20 nt, synthetic construct
  source 1..20: mol_type = other RNA
cagcctaataagggaactgg

SEQ ID NO: 11935 - RNA, 20 nt, synthetic construct
  source 1..20: mol_type = other RNA
gggaagcagataatttaaag

SEQ ID NO: 11936 - RNA, 20 nt, synthetic construct
  source 1..20: mol_type = other RNA
aggaatagtcagggaagcag

SEQ ID NO: 11937 - RNA, 20 nt, synthetic construct
  source 1..20: mol_type = other RNA
tcctcttgtaccccccacct

SEQ ID NO: 11938 - RNA, 20 nt, synthetic construct
  source 1..20: mol_type = other RNA
ttaatctttttaaagcgtgc

SEQ ID NO: 11939 - RNA, 20 nt, synthetic construct
  source 1..20: mol_type = other RNA
taaaaccagacaagccttac

SEQ ID NO: 11940 - RNA, 20 nt, synthetic construct
  source 1..20: mol_type = other RNA
ggttttaggacaggtaaaat

SEQ ID NO: 11941 - RNA, 20 nt, synthetic construct
  source 1..20: mol_type = other RNA
tcccagcctctcttcacttt

SEQ ID NO: 11942 - RNA, 20 nt, synthetic construct
  source 1..20: mol_type = other RNA
aagtgaaagtgaagagaggc

SEQ ID NO: 11943 - RNA, 20 nt, synthetic construct
  source 1..20: mol_type = other RNA
gtcaaagtgaaagtgaagag

SEQ ID NO: 11944 - RNA, 20 nt, synthetic construct
  source 1..20: mol_type = other RNA
gggtcagtcaaagtgaaagt

SEQ ID NO: 11945 - RNA, 20 nt, synthetic construct
  source 1..20: mol_type = other RNA
gtgaagctttgcagcagtac

SEQ ID NO: 11946 - RNA, 20 nt, synthetic construct
  source 1..20: mol_type = other RNA
gactgatctctcaaacccca

SEQ ID NO: 11947 - RNA, 20 nt, synthetic construct
  source 1..20: mol_type = other RNA
gacacgattggcagggagag

SEQ ID NO: 11948 - RNA, 20 nt, synthetic construct
  source 1..20: mol_type = other RNA
gaattcttacacaagagcca

SEQ ID NO: 11949 - RNA, 20 nt, synthetic construct
  source 1..20: mol_type = other RNA
tggctcttgtgtaagaattc

SEQ ID NO: 11950 - RNA, 20 nt, synthetic construct
  source 1..20: mol_type = other RNA
aaacaacttgaccttactgt

SEQ ID NO: 11951 - RNA, 20 nt, synthetic construct
  source 1..20: mol_type = other RNA
agttgtttggacagaaagcc

SEQ ID NO: 11952 - RNA, 20 nt, synthetic construct
  source 1..20: mol_type = other RNA
gcgtgcagcggctgccactg

SEQ ID NO: 11953 - RNA, 20 nt, synthetic construct
  source 1..20: mol_type = other RNA
ggtatgaggaagaaaataga

SEQ ID NO: 11954 - RNA, 20 nt, synthetic construct
  source 1..20: mol_type = other RNA
gggccaggaacaacggtaat

SEQ ID NO: 11955 - RNA, 20 nt, synthetic construct
  source 1..20: mol_type = other RNA
ggtgtggtatcaggaataat

SEQ ID NO: 11956 - RNA, 20 nt, synthetic construct
  source 1..20: mol_type = other RNA
tgggggtcaggtgtggtatc

SEQ ID NO: 11957 - RNA, 20 nt, synthetic construct
  source 1..20: mol_type = other RNA
ggtggatcagagagatacag

SEQ ID NO: 11958 - RNA, 20 nt, synthetic construct
  source 1..20: mol_type = other RNA
gcctttgctggtgtgtggcg

SEQ ID NO: 11959 - RNA, 20 nt, synthetic construct
  source 1..20: mol_type = other RNA
tgaataatccctgaggagta

SEQ ID NO: 11960 - RNA, 20 nt, synthetic construct
  source 1..20: mol_type = other RNA
tgggtggggcaaatcctcga

SEQ ID NO: 11961 - RNA, 20 nt, synthetic construct
  source 1..20: mol_type = other RNA
gataactaaaatacctctta

SEQ ID NO: 11962 - RNA, 20 nt, synthetic construct
  source 1..20: mol_type = other RNA
ggaggtattttagttactgg

SEQ ID NO: 11963 - RNA, 20 nt, synthetic construct
  source 1..20: mol_type = other RNA
gagaaggccaccgcagtcat

SEQ ID NO: 11964 - RNA, 20 nt, synthetic construct
  source 1..20: mol_type = other RNA
tctcttcccttctgtcagac

SEQ ID NO: 11965 - RNA, 20 nt, synthetic construct
  source 1..20: mol_type = other RNA
gacacaattcctcagtttag

SEQ ID NO: 11966 - RNA, 20 nt, synthetic construct
  source 1..20: mol_type = other RNA
gacagaagggaagagatgac

SEQ ID NO: 11967 - RNA, 20 nt, synthetic construct
  source 1..20: mol_type = other RNA
gataacagatgagcctttat

SEQ ID NO: 11968 - RNA, 20 nt, synthetic construct
  source 1..20: mol_type = other RNA
aatcagccaagcattttttc

SEQ ID NO: 11969 - RNA, 20 nt, synthetic construct
  source 1..20: mol_type = other RNA
tccgtcttcaagaaaagtag

SEQ ID NO: 11970 - RNA, 20 nt, synthetic construct
  source 1..20: mol_type = other RNA
tcaagaaaagtagaacagac

SEQ ID NO: 11971 - RNA, 20 nt, synthetic construct
  source 1..20: mol_type = other RNA
gttctacttttcttgaagac

SEQ ID NO: 11972 - RNA, 20 nt, synthetic construct
  source 1..20: mol_type = other RNA
tttaaaaacacacctcacca

SEQ ID NO: 11973 - RNA, 20 nt, synthetic construct
  source 1..20: mol_type = other RNA
tttttggtggctgagcttgg

SEQ ID NO: 11974 - RNA, 20 nt, synthetic construct
  source 1..20: mol_type = other RNA
agtcctttttggtggctgag

SEQ ID NO: 11975 - RNA, 20 nt, synthetic construct
  source 1..20: mol_type = other RNA
tcggaatgctacaaggtaca

SEQ ID NO: 11976 - RNA, 20 nt, synthetic construct
  source 1..20: mol_type = other RNA
atacaggagcttaaatgggc

SEQ ID NO: 11977 - RNA, 20 nt, synthetic construct
  source 1..20: mol_type = other RNA
cattccagacaccagaccaa

SEQ ID NO: 11978 - RNA, 20 nt, synthetic construct
  source 1..20: mol_type = other RNA
ggaatgagactggggcctaa

SEQ ID NO: 11979 - RNA, 20 nt, synthetic construct
  source 1..20: mol_type = other RNA
ggtgtctggaatgagactgg

SEQ ID NO: 11980 - RNA, 20 nt, synthetic construct
  source 1..20: mol_type = other RNA
aagttggtctggtgtctgga

SEQ ID NO: 11981 - RNA, 20 nt, synthetic construct
  source 1..20: mol_type = other RNA
tccctactatcttctgtcta

SEQ ID NO: 11982 - RNA, 20 nt, synthetic construct
  source 1..20: mol_type = other RNA
agtcatactcctattcaccg

SEQ ID NO: 11983 - RNA, 20 nt, synthetic construct
  source 1..20: mol_type = other RNA
tactcctattcaccgttctc

SEQ ID NO: 11984 - RNA, 20 nt, synthetic construct
  source 1..20: mol_type = other RNA
tgccagcaaagattatttat

SEQ ID NO: 11985 - RNA, 20 nt, synthetic construct
  source 1..20: mol_type = other RNA
taggtcctcccaattcttag

SEQ ID NO: 11986 - RNA, 20 nt, synthetic construct
  source 1..20: mol_type = other RNA
tcccaattcttagtcctttt

SEQ ID NO: 11987 - RNA, 20 nt, synthetic construct
  source 1..20: mol_type = other RNA
ttttatacctgtttttctcc

SEQ ID NO: 11988 - RNA, 20 nt, synthetic construct
  source 1..20: mol_type = other RNA
tatagaatgattggtgatgg

SEQ ID NO: 11989 - RNA, 20 nt, synthetic construct
  source 1..20: mol_type = other RNA
ggcctctgagcccaagccac

SEQ ID NO: 11990 - RNA, 20 nt, synthetic construct
  source 1..20: mol_type = other RNA
caggggatgcgatggcgtgg

SEQ ID NO: 11991 - RNA, 20 nt, synthetic construct
  source 1..20: mol_type = other RNA
tcagttaaggtggggcaggg

SEQ ID NO: 11992 - RNA, 20 nt, synthetic construct
  source 1..20: mol_type = other RNA
ttgccttaactgatgacatt

SEQ ID NO: 11993 - RNA, 20 nt, synthetic construct
  source 1..20: mol_type = other RNA
tcagttaaggcaaggaccgg

SEQ ID NO: 11994 - RNA, 20 nt, synthetic construct
  source 1..20: mol_type = other RNA
tttccctggttcatcctggc

SEQ ID NO: 11995 - RNA, 20 nt, synthetic construct
  source 1..20: mol_type = other RNA
caaggtgctcagtgggggtg

SEQ ID NO: 11996 - RNA, 20 nt, synthetic construct
  source 1..20: mol_type = other RNA
caaggtgctcagtgggcagg

SEQ ID NO: 11997 - RNA, 20 nt, synthetic construct
  source 1..20: mol_type = other RNA
aagggggtttgttatctggc

SEQ ID NO: 11998 - RNA, 20 nt, synthetic construct
  source 1..20: mol_type = other RNA
gcgaagggagataagggtgg

SEQ ID NO: 11999 - RNA, 20 nt, synthetic construct
  source 1..20: mol_type = other RNA
gaaaagagagtcagcgaagg

SEQ ID NO: 12000 - RNA, 20 nt, synthetic construct
  source 1..20: mol_type = other RNA
cttcacacggacgcgcatga

SEQ ID NO: 12001 - RNA, 20 nt, synthetic construct
  source 1..20: mol_type = other RNA
gtgtgaagagaccaccaaac

SEQ ID NO: 12002 - RNA, 20 nt, synthetic construct
  source 1..20: mol_type = other RNA
tagcacagttacttaaaaaa

SEQ ID NO: 12003 - RNA, 20 nt, synthetic construct
  source 1..20: mol_type = other RNA
ctggccttcacattcactcc

SEQ ID NO: 12004 - RNA, 20 nt, synthetic construct
  source 1..20: mol_type = other RNA
gtgagtgagtggggagtgaa

SEQ ID NO: 12005 - RNA, 20 nt, synthetic construct
  source 1..20: mol_type = other RNA
tgcaagctctgttcatgcta

SEQ ID NO: 12006 - RNA, 20 nt, synthetic construct
  source 1..20: mol_type = other RNA
caaaaaaaaaaaaaaaaaaa

SEQ ID NO: 12007 - RNA, 20 nt, synthetic construct
  source 1..20: mol_type = other RNA
cactctgttgcccagggtgg

SEQ ID NO: 12008 - RNA, 20 nt, synthetic construct
  source 1..20: mol_type = other RNA
cagctactcgggaggctgag

SEQ ID NO: 12009 - RNA, 20 nt, synthetic construct
  source 1..20: mol_type = other RNA
cgatctcctgacctcgtgat

SEQ ID NO: 12010 - RNA, 20 nt, synthetic construct
  source 1..20: mol_type = other RNA
ggagatcgagaccatcctgg

SEQ ID NO: 12011 - RNA, 20 nt, synthetic construct
  source 1..20: mol_type = other RNA
gtagtctaggagcaataggc

SEQ ID NO: 12012 - RNA, 20 nt, synthetic construct
  source 1..20: mol_type = other RNA
aggagcaataggctgtctat

SEQ ID NO: 12013 - RNA, 20 nt, synthetic construct
  source 1..20: mol_type = other RNA
atcccatatagtctcggtgt

SEQ ID NO: 12014 - RNA, 20 nt, synthetic construct
  source 1..20: mol_type = other RNA
cggtgtgtagtgggctaccc

SEQ ID NO: 12015 - RNA, 20 nt, synthetic construct
  source 1..20: mol_type = other RNA
aactatatgatattcgcacc

SEQ ID NO: 12016 - RNA, 20 nt, synthetic construct
  source 1..20: mol_type = other RNA
tggtgcgaatatcatatagt

SEQ ID NO: 12017 - RNA, 20 nt, synthetic construct
  source 1..20: mol_type = other RNA
ctggcaattttgtcatggtg

SEQ ID NO: 12018 - RNA, 20 nt, synthetic construct
  source 1..20: mol_type = other RNA
tgcatccatatgtccctggc

SEQ ID NO: 12019 - RNA, 20 nt, synthetic construct
  source 1..20: mol_type = other RNA
tcagattacaccggaagact

SEQ ID NO: 12020 - RNA, 20 nt, synthetic construct
  source 1..20: mol_type = other RNA
tccggtgtaatctgatgaca

SEQ ID NO: 12021 - RNA, 20 nt, synthetic construct
  source 1..20: mol_type = other RNA
gttgcacgctctggcacctc

SEQ ID NO: 12022 - RNA, 20 nt, synthetic construct
  source 1..20: mol_type = other RNA
ttccacctccagagaccttg

SEQ ID NO: 12023 - RNA, 20 nt, synthetic construct
  source 1..20: mol_type = other RNA
ctggaggtggaaggactgag

SEQ ID NO: 12024 - RNA, 20 nt, synthetic construct
  source 1..20: mol_type = other RNA
ctacgataacaagctcctcc

SEQ ID NO: 12025 - RNA, 20 nt, synthetic construct
  source 1..20: mol_type = other RNA
gaaagggcgtgtttggaatg

SEQ ID NO: 12026 - RNA, 20 nt, synthetic construct
  source 1..20: mol_type = other RNA
atgaaaatattggagttggg

SEQ ID NO: 12027 - RNA, 20 nt, synthetic construct
  source 1..20: mol_type = other RNA
gcctctcactcacctccttg

SEQ ID NO: 12028 - RNA, 20 nt, synthetic construct
  source 1..20: mol_type = other RNA
gggctgggaggaggggagat

SEQ ID NO: 12029 - RNA, 20 nt, synthetic construct
  source 1..20: mol_type = other RNA
agtctgccatccaccctccc

SEQ ID NO: 12030 - RNA, 20 nt, synthetic construct
  source 1..20: mol_type = other RNA
gccatccaccctccccacat

SEQ ID NO: 12031 - RNA, 20 nt, synthetic construct
  source 1..20: mol_type = other RNA
cactcacaaaccactcggct

SEQ ID NO: 12032 - RNA, 20 nt, synthetic construct
  source 1..20: mol_type = other RNA
taaaaacccactccgtttcc

SEQ ID NO: 12033 - RNA, 20 nt, synthetic construct
  source 1..20: mol_type = other RNA
atttctctgcctgacttatt

SEQ ID NO: 12034 - RNA, 20 nt, synthetic construct
  source 1..20: mol_type = other RNA
ggcagagaaatggacttgga

SEQ ID NO: 12035 - RNA, 20 nt, synthetic construct
  source 1..20: mol_type = other RNA
gtgaaatggcaatagttaca

SEQ ID NO: 12036 - RNA, 20 nt, synthetic construct
  source 1..20: mol_type = other RNA
atctcttcgtctgtgaaatg

SEQ ID NO: 12037 - RNA, 20 nt, synthetic construct
  source 1..20: mol_type = other RNA
cttcctgtgtgtctatctct

SEQ ID NO: 12038 - RNA, 20 nt, synthetic construct
  source 1..20: mol_type = other RNA
cgcagtctcttcctgtgtgt

SEQ ID NO: 12039 - RNA, 20 nt, synthetic construct
  source 1..20: mol_type = other RNA
tggagcccaggcctgtggcc

SEQ ID NO: 12040 - RNA, 20 nt, synthetic construct
  source 1..20: mol_type = other RNA
gggggcagggcagcactgca

SEQ ID NO: 12041 - RNA, 20 nt, synthetic construct
  source 1..20: mol_type = other RNA
ttgtctgggggcagggcagc

SEQ ID NO: 12042 - RNA, 20 nt, synthetic construct
  source 1..20: mol_type = other RNA
attttctcattggaatagga

SEQ ID NO: 12043 - RNA, 20 nt, synthetic construct
  source 1..20: mol_type = other RNA
agaggatagagccttccacc

SEQ ID NO: 12044 - RNA, 20 nt, synthetic construct
  source 1..20: mol_type = other RNA
caactgtaacacttccatca

SEQ ID NO: 12045 - RNA, 20 nt, synthetic construct
  source 1..20: mol_type = other RNA
gtggtggccgtctttggctc

SEQ ID NO: 12046 - RNA, 20 nt, synthetic construct
  source 1..20: mol_type = other RNA
ttggctcctcttcctgcatt

SEQ ID NO: 12047 - RNA, 20 nt, synthetic construct
  source 1..20: mol_type = other RNA
ctacacaggccttcctggtg

SEQ ID NO: 12048 - RNA, 20 nt, synthetic construct
  source 1..20: mol_type = other RNA
ggtgttctgatttagccatg

SEQ ID NO: 12049 - RNA, 20 nt, synthetic construct
  source 1..20: mol_type = other RNA
gatgctggggtccggtgttc

SEQ ID NO: 12050 - RNA, 20 nt, synthetic construct
  source 1..20: mol_type = other RNA
cgtgggcctcatttgaccca

SEQ ID NO: 12051 - RNA, 20 nt, synthetic construct
  source 1..20: mol_type = other RNA
aatgaggcccacgggacaag

SEQ ID NO: 12052 - RNA, 20 nt, synthetic construct
  source 1..20: mol_type = other RNA
cttcctcctcctggacatgc

SEQ ID NO: 12053 - RNA, 20 nt, synthetic construct
  source 1..20: mol_type = other RNA
aggaggaggaagtgaccaac

SEQ ID NO: 12054 - RNA, 20 nt, synthetic construct
  source 1..20: mol_type = other RNA
cctgtcattgaattacgttg

SEQ ID NO: 12055 - RNA, 20 nt, synthetic construct
  source 1..20: mol_type = other RNA
ttgaattacgttgatatgtt

SEQ ID NO: 12056 - RNA, 20 nt, synthetic construct
  source 1..20: mol_type = other RNA
acatatcaacgtaattcaat

SEQ ID NO: 12057 - RNA, 20 nt, synthetic construct
  source 1..20: mol_type = other RNA
catggaacttaggggagatg

SEQ ID NO: 12058 - RNA, 20 nt, synthetic construct
  source 1..20: mol_type = other RNA
cttaaggagcagctggggag

SEQ ID NO: 12059 - RNA, 20 nt, synthetic construct
  source 1..20: mol_type = other RNA
cctctcacatctcatctgtg

SEQ ID NO: 12060 - RNA, 20 nt, synthetic construct
  source 1..20: mol_type = other RNA
acagatgagatgtgagaggt

SEQ ID NO: 12061 - RNA, 20 nt, synthetic construct
  source 1..20: mol_type = other RNA
cactgctgcctctgatctaa

SEQ ID NO: 12062 - RNA, 20 nt, synthetic construct
  source 1..20: mol_type = other RNA
cccacctgctctctctgctt

SEQ ID NO: 12063 - RNA, 20 nt, synthetic construct
  source 1..20: mol_type = other RNA
ccgacatctattttccaaat

SEQ ID NO: 12064 - RNA, 20 nt, synthetic construct
  source 1..20: mol_type = other RNA
gtgaccagggtaaaagcaga

SEQ ID NO: 12065 - RNA, 20 nt, synthetic construct
  source 1..20: mol_type = other RNA
ctctgatatggtttcgctgt

SEQ ID NO: 12066 - RNA, 20 nt, synthetic construct
  source 1..20: mol_type = other RNA
ccattcaaatctcagcttga

SEQ ID NO: 12067 - RNA, 20 nt, synthetic construct
  source 1..20: mol_type = other RNA
ctcccacaacacgtgggaat

SEQ ID NO: 12068 - RNA, 20 nt, synthetic construct
  source 1..20: mol_type = other RNA
ttcccatgctattctcatgg

SEQ ID NO: 12069 - RNA, 20 nt, synthetic construct
  source 1..20: mol_type = other RNA
caggagatctgatgggttta

SEQ ID NO: 12070 - RNA, 20 nt, synthetic construct
  source 1..20: mol_type = other RNA
tgattctgagacctccgcag

SEQ ID NO: 12071 - RNA, 20 nt, synthetic construct
  source 1..20: mol_type = other RNA
cagaatcatgacgggaaacg

SEQ ID NO: 12072 - RNA, 20 nt, synthetic construct
  source 1..20: mol_type = other RNA
aattaaacctatttttcttc

SEQ ID NO: 12073 - RNA, 20 nt, synthetic construct
  source 1..20: mol_type = other RNA
caggtatgtctttatcagca

SEQ ID NO: 12074 - RNA, 20 nt, synthetic construct
  source 1..20: mol_type = other RNA
ttatcagcagcataaaaatg

SEQ ID NO: 12075 - RNA, 20 nt, synthetic construct
  source 1..20: mol_type = other RNA
atttttatgctgctgataaa

SEQ ID NO: 12076 - RNA, 20 nt, synthetic construct
  source 1..20: mol_type = other RNA
tttccacattttcaggtatc

SEQ ID NO: 12077 - RNA, 20 nt, synthetic construct
  source 1..20: mol_type = other RNA
tcttctgagccctccaaact

SEQ ID NO: 12078 - RNA, 20 nt, synthetic construct
  source 1..20: mol_type = other RNA
ctaggaagttccaaactttc

SEQ ID NO: 12079 - RNA, 20 nt, synthetic construct
  source 1..20: mol_type = other RNA
aagccattgaacaagtctct

SEQ ID NO: 12080 - RNA, 20 nt, synthetic construct
  source 1..20: mol_type = other RNA
cagagggggcagatgaggaa

SEQ ID NO: 12081 - RNA, 20 nt, synthetic construct
  source 1..20: mol_type = other RNA
cctttgctccagttcccaac

SEQ ID NO: 12082 - RNA, 20 nt, synthetic construct
  source 1..20: mol_type = other RNA
ctttgctaaaacataacagg

SEQ ID NO: 12083 - RNA, 20 nt, synthetic construct
  source 1..20: mol_type = other RNA
aacttgagagagacgattta

SEQ ID NO: 12084 - RNA, 20 nt, synthetic construct
  source 1..20: mol_type = other RNA
ctctcaagttcgacgttccg

SEQ ID NO: 12085 - RNA, 20 nt, synthetic construct
  source 1..20: mol_type = other RNA
cctcttgaatgctttgctgc

SEQ ID NO: 12086 - RNA, 20 nt, synthetic construct
  source 1..20: mol_type = other RNA
ccaggccatgtcagggacct

SEQ ID NO: 12087 - RNA, 20 nt, synthetic construct
  source 1..20: mol_type = other RNA
gggaccttcacaacagctcc

SEQ ID NO: 12088 - RNA, 20 nt, synthetic construct
  source 1..20: mol_type = other RNA
ctgacatggcctggagacat

SEQ ID NO: 12089 - RNA, 20 nt, synthetic construct
  source 1..20: mol_type = other RNA
ctgggctgcacacagcacag

SEQ ID NO: 12090 - RNA, 20 nt, synthetic construct
  source 1..20: mol_type = other RNA
cagctgctccaggcatggct

SEQ ID NO: 12091 - RNA, 20 nt, synthetic construct
  source 1..20: mol_type = other RNA
acatacagcttgggctgtgg

SEQ ID NO: 12092 - RNA, 20 nt, synthetic construct
  source 1..20: mol_type = other RNA
tggggcttccacctctgaag

SEQ ID NO: 12093 - RNA, 20 nt, synthetic construct
  source 1..20: mol_type = other RNA
agaattgaggtttgggaacc

SEQ ID NO: 12094 - RNA, 20 nt, synthetic construct
  source 1..20: mol_type = other RNA
tctgaaatctaggtggaggt

SEQ ID NO: 12095 - RNA, 20 nt, synthetic construct
  source 1..20: mol_type = other RNA
aggcagaaatttgcttcagg

SEQ ID NO: 12096 - RNA, 20 nt, synthetic construct
  source 1..20: mol_type = other RNA
taccagaggttctccatgag

SEQ ID NO: 12097 - RNA, 20 nt, synthetic construct
  source 1..20: mol_type = other RNA
cagcccccagacagaatccc

SEQ ID NO: 12098 - RNA, 20 nt, synthetic construct
  source 1..20: mol_type = other RNA
gggggctgtgaccccacatt

SEQ ID NO: 12099 - RNA, 20 nt, synthetic construct
  source 1..20: mol_type = other RNA
tccagaccccagaatggtag

SEQ ID NO: 12100 - RNA, 20 nt, synthetic construct
  source 1..20: mol_type = other RNA
ggaggacagtggccctctac

SEQ ID NO: 12101 - RNA, 20 nt, synthetic construct
  source 1..20: mol_type = other RNA
gtggatctaccattctgggg

SEQ ID NO: 12102 - RNA, 20 nt, synthetic construct
  source 1..20: mol_type = other RNA
gcagattttccaggagaaca

SEQ ID NO: 12103 - RNA, 20 nt, synthetic construct
  source 1..20: mol_type = other RNA
caggggcagagctgcccaag

SEQ ID NO: 12104 - RNA, 20 nt, synthetic construct
  source 1..20: mol_type = other RNA
tgggcagctctgcccctgtg

SEQ ID NO: 12105 - RNA, 20 nt, synthetic construct
  source 1..20: mol_type = other RNA
cgctgatgcaagaggtaggt

SEQ ID NO: 12106 - RNA, 20 nt, synthetic construct
  source 1..20: mol_type = other RNA
aaggagatcattttggagct

SEQ ID NO: 12107 - RNA, 20 nt, synthetic construct
  source 1..20: mol_type = other RNA
aattttaaagctccaaaatg

SEQ ID NO: 12108 - RNA, 20 nt, synthetic construct
  source 1..20: mol_type = other RNA
aaaatccagtggtgcagtca

SEQ ID NO: 12109 - RNA, 20 nt, synthetic construct
  source 1..20: mol_type = other RNA
cttccacctatgagcctgta

SEQ ID NO: 12110 - RNA, 20 nt, synthetic construct
  source 1..20: mol_type = other RNA
cagatgagactttggactgt

SEQ ID NO: 12111 - RNA, 20 nt, synthetic construct
  source 1..20: mol_type = other RNA
catctgagacaaggcaagtc

SEQ ID NO: 12112 - RNA, 20 nt, synthetic construct
  source 1..20: mol_type = other RNA
aaagtctcatctgagacaag

SEQ ID NO: 12113 - RNA, 20 nt, synthetic construct
  source 1..20: mol_type = other RNA
acagtccaaagtctcatctg

SEQ ID NO: 12114 - RNA, 20 nt, synthetic construct
  source 1..20: mol_type = other RNA
atgctgaaatgagttaaaac

SEQ ID NO: 12115 - RNA, 20 nt, synthetic construct
  source 1..20: mol_type = other RNA
ctcaaagttttaactcattt

SEQ ID NO: 12116 - RNA, 20 nt, synthetic construct
  source 1..20: mol_type = other RNA
tcacatttcaaaaccaatca

SEQ ID NO: 12117 - RNA, 20 nt, synthetic construct
  source 1..20: mol_type = other RNA
ggggcagaatgatgtggttt

SEQ ID NO: 12118 - RNA, 20 nt, synthetic construct
  source 1..20: mol_type = other RNA
cccagaattcccacatgttg

SEQ ID NO: 12119 - RNA, 20 nt, synthetic construct
  source 1..20: mol_type = other RNA
ttcccatgctattctcgtga

SEQ ID NO: 12120 - RNA, 20 nt, synthetic construct
  source 1..20: mol_type = other RNA
cataggatctgatgggatta

SEQ ID NO: 12121 - RNA, 20 nt, synthetic construct
  source 1..20: mol_type = other RNA
aattaaacctctttttcttc

SEQ ID NO: 12122 - RNA, 20 nt, synthetic construct
  source 1..20: mol_type = other RNA
tgggtatgtctttatcagca

SEQ ID NO: 12123 - RNA, 20 nt, synthetic construct
  source 1..20: mol_type = other RNA
ttatcagcagcatgaaaacg

SEQ ID NO: 12124 - RNA, 20 nt, synthetic construct
  source 1..20: mol_type = other RNA
ccagaatggttggcgagctc

SEQ ID NO: 12125 - RNA, 20 nt, synthetic construct
  source 1..20: mol_type = other RNA
gcccccacaccagcctccag

SEQ ID NO: 12126 - RNA, 20 nt, synthetic construct
  source 1..20: mol_type = other RNA
ggggcagcacttctccactg

SEQ ID NO: 12127 - RNA, 20 nt, synthetic construct
  source 1..20: mol_type = other RNA
acggcccgtcctctcagctc

SEQ ID NO: 12128 - RNA, 20 nt, synthetic construct
  source 1..20: mol_type = other RNA
tctcagctcctttcctccag

SEQ ID NO: 12129 - RNA, 20 nt, synthetic construct
  source 1..20: mol_type = other RNA
cccaccctcttctcttttcc

SEQ ID NO: 12130 - RNA, 20 nt, synthetic construct
  source 1..20: mol_type = other RNA
tctgttccgccctactagag

SEQ ID NO: 12131 - RNA, 20 nt, synthetic construct
  source 1..20: mol_type = other RNA
gttccgccctactagaggga

SEQ ID NO: 12132 - RNA, 20 nt, synthetic construct
  source 1..20: mol_type = other RNA
ctggtacataataggtgttc

SEQ ID NO: 12133 - RNA, 20 nt, synthetic construct
  source 1..20: mol_type = other RNA
ttaaacatacatgtcaggct

SEQ ID NO: 12134 - RNA, 20 nt, synthetic construct
  source 1..20: mol_type = other RNA
ggctctagcttggtgctagg

SEQ ID NO: 12135 - RNA, 20 nt, synthetic construct
  source 1..20: mol_type = other RNA
tccttggcatccctagcacc

SEQ ID NO: 12136 - RNA, 20 nt, synthetic construct
  source 1..20: mol_type = other RNA
ggtcatccttggcatcccta

SEQ ID NO: 12137 - RNA, 20 nt, synthetic construct
  source 1..20: mol_type = other RNA
tgaactcagtataagcaggg

SEQ ID NO: 12138 - RNA, 20 nt, synthetic construct
  source 1..20: mol_type = other RNA
tccccacgggtcgtgaactc

SEQ ID NO: 12139 - RNA, 20 nt, synthetic construct
  source 1..20: mol_type = other RNA
gagagtgcatctgtcttccc

SEQ ID NO: 12140 - RNA, 20 nt, synthetic construct
  source 1..20: mol_type = other RNA
ccttccatgtagcccctact

SEQ ID NO: 12141 - RNA, 20 nt, synthetic construct
  source 1..20: mol_type = other RNA
ccccgacctcaggagggaga

SEQ ID NO: 12142 - RNA, 20 nt, synthetic construct
  source 1..20: mol_type = other RNA
gggagacagggctgcaactc

SEQ ID NO: 12143 - RNA, 20 nt, synthetic construct
  source 1..20: mol_type = other RNA
actctgacccatagctgtgt

SEQ ID NO: 12144 - RNA, 20 nt, synthetic construct
  source 1..20: mol_type = other RNA
gagtggacttaaactccctt

SEQ ID NO: 12145 - RNA, 20 nt, synthetic construct
  source 1..20: mol_type = other RNA
attaaacagagatgatagtc

SEQ ID NO: 12146 - RNA, 20 nt, synthetic construct
  source 1..20: mol_type = other RNA
cagcacagcatgtcccacag

SEQ ID NO: 12147 - RNA, 20 nt, synthetic construct
  source 1..20: mol_type = other RNA
cacagggctggggcgaatga

SEQ ID NO: 12148 - RNA, 20 nt, synthetic construct
  source 1..20: mol_type = other RNA
cattcgccccagccctgtgg

SEQ ID NO: 12149 - RNA, 20 nt, synthetic construct
  source 1..20: mol_type = other RNA
acaaagcattttcatccttc

SEQ ID NO: 12150 - RNA, 20 nt, synthetic construct
  source 1..20: mol_type = other RNA
tttggggtttttctgaggtg

SEQ ID NO: 12151 - RNA, 20 nt, synthetic construct
  source 1..20: mol_type = other RNA
cactctgttgcccagctgaa

SEQ ID NO: 12152 - RNA, 20 nt, synthetic construct
  source 1..20: mol_type = other RNA
cgaactcctgacctcaattg

SEQ ID NO: 12153 - RNA, 20 nt, synthetic construct
  source 1..20: mol_type = other RNA
ggagttcgagaccagcctgg

SEQ ID NO: 12154 - RNA, 20 nt, synthetic construct
  source 1..20: mol_type = other RNA
gcctcggactcccaaaatgc

SEQ ID NO: 12155 - RNA, 20 nt, synthetic construct
  source 1..20: mol_type = other RNA
gaggcagacggatcaattga

SEQ ID NO: 12156 - RNA, 20 nt, synthetic construct
  source 1..20: mol_type = other RNA
gcattctacagttatatcat

SEQ ID NO: 12157 - RNA, 20 nt, synthetic construct
  source 1..20: mol_type = other RNA
tgatgtctgcattctacagt

SEQ ID NO: 12158 - RNA, 20 nt, synthetic construct
  source 1..20: mol_type = other RNA
gtaccttaaatcttatgttg

SEQ ID NO: 12159 - RNA, 20 nt, synthetic construct
  source 1..20: mol_type = other RNA
ctgcataaacaacataagat

SEQ ID NO: 12160 - RNA, 20 nt, synthetic construct
  source 1..20: mol_type = other RNA
aacatcaataacttttaaac

SEQ ID NO: 12161 - RNA, 20 nt, synthetic construct
  source 1..20: mol_type = other RNA
atatataaacctccatttat

SEQ ID NO: 12162 - RNA, 20 nt, synthetic construct
  source 1..20: mol_type = other RNA
gttcatatggtgggatattt

SEQ ID NO: 12163 - RNA, 20 nt, synthetic construct
  source 1..20: mol_type = other RNA
ctccattgatgaatgtttgg

SEQ ID NO: 12164 - RNA, 20 nt, synthetic construct
  source 1..20: mol_type = other RNA
tatattacacttctgtttgc

SEQ ID NO: 12165 - RNA, 20 nt, synthetic construct
  source 1..20: mol_type = other RNA
cctctaataaaactctcact

SEQ ID NO: 12166 - RNA, 20 nt, synthetic construct
  source 1..20: mol_type = other RNA
gagccaggactcataccacc

SEQ ID NO: 12167 - RNA, 20 nt, synthetic construct
  source 1..20: mol_type = other RNA
tggctccgactgcaacatgt

SEQ ID NO: 12168 - RNA, 20 nt, synthetic construct
  source 1..20: mol_type = other RNA
cgctgctgggagccacaggg

SEQ ID NO: 12169 - RNA, 20 nt, synthetic construct
  source 1..20: mol_type = other RNA
gggcttcctataccctgttc

SEQ ID NO: 12170 - RNA, 20 nt, synthetic construct
  source 1..20: mol_type = other RNA
ttactgagtcagaagctgtt

SEQ ID NO: 12171 - RNA, 20 nt, synthetic construct
  source 1..20: mol_type = other RNA
gaagctgttttaagagctga

SEQ ID NO: 12172 - RNA, 20 nt, synthetic construct
  source 1..20: mol_type = other RNA
tggaccctttgtccatcctg

SEQ ID NO: 12173 - RNA, 20 nt, synthetic construct
  source 1..20: mol_type = other RNA
aggacagcagcacgcttttc

SEQ ID NO: 12174 - RNA, 20 nt, synthetic construct
  source 1..20: mol_type = other RNA
atcctgggccattgggccag

SEQ ID NO: 12175 - RNA, 20 nt, synthetic construct
  source 1..20: mol_type = other RNA
ttgctagattatattagggc

SEQ ID NO: 12176 - RNA, 20 nt, synthetic construct
  source 1..20: mol_type = other RNA
acttgcctaattatttcctt

SEQ ID NO: 12177 - RNA, 20 nt, synthetic construct
  source 1..20: mol_type = other RNA
gtatatagcacattttcaca

SEQ ID NO: 12178 - RNA, 20 nt, synthetic construct
  source 1..20: mol_type = other RNA
gtagcaaactgtgaaaatgt

SEQ ID NO: 12179 - RNA, 20 nt, synthetic construct
  source 1..20: mol_type = other RNA
caagggagttttgttactaa

SEQ ID NO: 12180 - RNA, 20 nt, synthetic construct
  source 1..20: mol_type = other RNA
tagtaacaaaactcccttgc

SEQ ID NO: 12181 - RNA, 20 nt, synthetic construct
  source 1..20: mol_type = other RNA
tttctaatcagggagaaaaa

SEQ ID NO: 12182 - RNA, 20 nt, synthetic construct
  source 1..20: mol_type = other RNA
tccttttttaaatctttttt

SEQ ID NO: 12183 - RNA, 20 nt, synthetic construct
  source 1..20: mol_type = other RNA
tgaaataaaaggctgataag

SEQ ID NO: 12184 - RNA, 20 nt, synthetic construct
  source 1..20: mol_type = other RNA
aacttatcagccttttattt

SEQ ID NO: 12185 - RNA, 20 nt, synthetic construct
  source 1..20: mol_type = other RNA
aaaatcaatcaacaaactgg

SEQ ID NO: 12186 - RNA, 20 nt, synthetic construct
  source 1..20: mol_type = other RNA
cttatgtatgttgcaaatct

SEQ ID NO: 12187 - RNA, 20 nt, synthetic construct
  source 1..20: mol_type = other RNA
cttcattttttcattttggc

SEQ ID NO: 12188 - RNA, 20 nt, synthetic construct
  source 1..20: mol_type = other RNA
ttgaactgtctcttcatttt

SEQ ID NO: 12189 - RNA, 20 nt, synthetic construct
  source 1..20: mol_type = other RNA
aaatatttggcaactctgtg

SEQ ID NO: 12190 - RNA, 20 nt, synthetic construct
  source 1..20: mol_type = other RNA
cacccaggccaacacagagt

SEQ ID NO: 12191 - RNA, 20 nt, synthetic construct
  source 1..20: mol_type = other RNA
aatgtaggaaactgcaatca

SEQ ID NO: 12192 - RNA, 20 nt, synthetic construct
  source 1..20: mol_type = other RNA
tgtgtctcgcttaggagaag

SEQ ID NO: 12193 - RNA, 20 nt, synthetic construct
  source 1..20: mol_type = other RNA
cgcttaggagaaggaaatgt

SEQ ID NO: 12194 - RNA, 20 nt, synthetic construct
  source 1..20: mol_type = other RNA
cttttgtgtggaagctgcat

SEQ ID NO: 12195 - RNA, 20 nt, synthetic construct
  source 1..20: mol_type = other RNA
cctctttgctttccgtcagc

SEQ ID NO: 12196 - RNA, 20 nt, synthetic construct
  source 1..20: mol_type = other RNA
gcctcagtgttcagcaatgt

SEQ ID NO: 12197 - RNA, 20 nt, synthetic construct
  source 1..20: mol_type = other RNA
ggttctggggtgagggtaat

SEQ ID NO: 12198 - RNA, 20 nt, synthetic construct
  source 1..20: mol_type = other RNA
ttgatggacatgtgaggtga

SEQ ID NO: 12199 - RNA, 20 nt, synthetic construct
  source 1..20: mol_type = other RNA
atcaaggactttgcttcact

SEQ ID NO: 12200 - RNA, 20 nt, synthetic construct
  source 1..20: mol_type = other RNA
cacctcacatgtccatcaag

SEQ ID NO: 12201 - RNA, 20 nt, synthetic construct
  source 1..20: mol_type = other RNA
aaggtttatttctgtctcac

SEQ ID NO: 12202 - RNA, 20 nt, synthetic construct
  source 1..20: mol_type = other RNA
tcccacgagcagtgctggag

SEQ ID NO: 12203 - RNA, 20 nt, synthetic construct
  source 1..20: mol_type = other RNA
ttatccatagctgtttgcac

SEQ ID NO: 12204 - RNA, 20 nt, synthetic construct
  source 1..20: mol_type = other RNA
gtccttatccatagctgttt

SEQ ID NO: 12205 - RNA, 20 nt, synthetic construct
  source 1..20: mol_type = other RNA
tttgctattgcaatccaagt

SEQ ID NO: 12206 - RNA, 20 nt, synthetic construct
  source 1..20: mol_type = other RNA
ttagccaatttcctattggt

SEQ ID NO: 12207 - RNA, 20 nt, synthetic construct
  source 1..20: mol_type = other RNA
taacctagccctaatctcgg

SEQ ID NO: 12208 - RNA, 20 nt, synthetic construct
  source 1..20: mol_type = other RNA
gattaagttgtccctctcca

SEQ ID NO: 12209 - RNA, 20 nt, synthetic construct
  source 1..20: mol_type = other RNA
ctctccaccccaccaatata

SEQ ID NO: 12210 - RNA, 20 nt, synthetic construct
  source 1..20: mol_type = other RNA
acttttataaaactacttgg

SEQ ID NO: 12211 - RNA, 20 nt, synthetic construct
  source 1..20: mol_type = other RNA
gcacagctctaatcggcgcc

SEQ ID NO: 12212 - RNA, 20 nt, synthetic construct
  source 1..20: mol_type = other RNA
caagtatctctcccctttct

SEQ ID NO: 12213 - RNA, 20 nt, synthetic construct
  source 1..20: mol_type = other RNA
ttggatttagggaccatcct

SEQ ID NO: 12214 - RNA, 20 nt, synthetic construct
  source 1..20: mol_type = other RNA
ctaaatccaatgactgatat

SEQ ID NO: 12215 - RNA, 20 nt, synthetic construct
  source 1..20: mol_type = other RNA
attacatctgcaaagatctc

SEQ ID NO: 12216 - RNA, 20 nt, synthetic construct
  source 1..20: mol_type = other RNA
cattcaaaagtaccaggggt

SEQ ID NO: 12217 - RNA, 20 nt, synthetic construct
  source 1..20: mol_type = other RNA
tagacttatctttttggggg

SEQ ID NO: 12218 - RNA, 20 nt, synthetic construct
  source 1..20: mol_type = other RNA
aagactaacccctggtactt

SEQ ID NO: 12219 - RNA, 20 nt, synthetic construct
  source 1..20: mol_type = other RNA
cccaaaaagataagtctaag

SEQ ID NO: 12220 - RNA, 20 nt, synthetic construct
  source 1..20: mol_type = other RNA
gcagccaccattgctgtgag

SEQ ID NO: 12221 - RNA, 20 nt, synthetic construct
  source 1..20: mol_type = other RNA
atgaggggaaggcaatggct

SEQ ID NO: 12222 - RNA, 20 nt, synthetic construct
  source 1..20: mol_type = other RNA
ctcaaaatgcttttctagcc

SEQ ID NO: 12223 - RNA, 20 nt, synthetic construct
  source 1..20: mol_type = other RNA
gctgagtataagaggatggt

SEQ ID NO: 12224 - RNA, 20 nt, synthetic construct
  source 1..20: mol_type = other RNA
cctctgccctgaaggaggaa

SEQ ID NO: 12225 - RNA, 20 nt, synthetic construct
  source 1..20: mol_type = other RNA
acacccatccttttcccctc

SEQ ID NO: 12226 - RNA, 20 nt, synthetic construct
  source 1..20: mol_type = other RNA
gaagcctcttctggggcctc

SEQ ID NO: 12227 - RNA, 20 nt, synthetic construct
  source 1..20: mol_type = other RNA
ccttctccctcttctcaaat

SEQ ID NO: 12228 - RNA, 20 nt, synthetic construct
  source 1..20: mol_type = other RNA
cttctcatcccatatcctcc

SEQ ID NO: 12229 - RNA, 20 nt, synthetic construct
  source 1..20: mol_type = other RNA
cagagcccagggtgcttcct

SEQ ID NO: 12230 - RNA, 20 nt, synthetic construct
  source 1..20: mol_type = other RNA
agcatgcagtgggtgtgttc

SEQ ID NO: 12231 - RNA, 20 nt, synthetic construct
  source 1..20: mol_type = other RNA
ccaggcccaggaagggggct

SEQ ID NO: 12232 - RNA, 20 nt, synthetic construct
  source 1..20: mol_type = other RNA
ctctgtgcacaggcttcatc

SEQ ID NO: 12233 - RNA, 20 nt, synthetic construct
  source 1..20: mol_type = other RNA
ttaccgtgcacccagagaat

SEQ ID NO: 12234 - RNA, 20 nt, synthetic construct
  source 1..20: mol_type = other RNA
caaaggggagcagcagggaa

SEQ ID NO: 12235 - RNA, 20 nt, synthetic construct
  source 1..20: mol_type = other RNA
gcaaaccatgagctcctact

SEQ ID NO: 12236 - RNA, 20 nt, synthetic construct
  source 1..20: mol_type = other RNA
gagttatccccatcgagccc

SEQ ID NO: 12237 - RNA, 20 nt, synthetic construct
  source 1..20: mol_type = other RNA
ctgtcaacccactggttgca

SEQ ID NO: 12238 - RNA, 20 nt, synthetic construct
  source 1..20: mol_type = other RNA
acccactggttgcactgtct

SEQ ID NO: 12239 - RNA, 20 nt, synthetic construct
  source 1..20: mol_type = other RNA
ttgtgcactggctctctgga

SEQ ID NO: 12240 - RNA, 20 nt, synthetic construct
  source 1..20: mol_type = other RNA
ttgcaaacaaagtggaaaga

SEQ ID NO: 12241 - RNA, 20 nt, synthetic construct
  source 1..20: mol_type = other RNA
aaagttgatgctctttccac

SEQ ID NO: 12242 - RNA, 20 nt, synthetic construct
  source 1..20: mol_type = other RNA
atactgggaagaaacaaagg

SEQ ID NO: 12243 - RNA, 20 nt, synthetic construct
  source 1..20: mol_type = other RNA
tgccacatgtacaatctgag

SEQ ID NO: 12244 - RNA, 20 nt, synthetic construct
  source 1..20: mol_type = other RNA
agttgatttcttgaacatgg

SEQ ID NO: 12245 - RNA, 20 nt, synthetic construct
  source 1..20: mol_type = other RNA
tataggtacattcagaattc

SEQ ID NO: 12246 - RNA, 20 nt, synthetic construct
  source 1..20: mol_type = other RNA
ttgcaaacttaaaacctgaa

SEQ ID NO: 12247 - RNA, 20 nt, synthetic construct
  source 1..20: mol_type = other RNA
agcctacatgcatttcaagg

SEQ ID NO: 12248 - RNA, 20 nt, synthetic construct
  source 1..20: mol_type = other RNA
gtgtgcagggtgcataaagg

SEQ ID NO: 12249 - RNA, 20 nt, synthetic construct
  source 1..20: mol_type = other RNA
aggctaagtttagaaggctg

SEQ ID NO: 12250 - RNA, 20 nt, synthetic construct
  source 1..20: mol_type = other RNA
acagtaggattgattcagaa

SEQ ID NO: 12251 - RNA, 20 nt, synthetic construct
  source 1..20: mol_type = other RNA
cactggtcagcaggagacaa

SEQ ID NO: 12252 - RNA, 20 nt, synthetic construct
  source 1..20: mol_type = other RNA
gcaggagacaaggtggaccc

SEQ ID NO: 12253 - RNA, 20 nt, synthetic construct
  source 1..20: mol_type = other RNA
cctgctgaccagtgagactt

SEQ ID NO: 12254 - RNA, 20 nt, synthetic construct
  source 1..20: mol_type = other RNA
accttgtctcctgctgacca

SEQ ID NO: 12255 - RNA, 20 nt, synthetic construct
  source 1..20: mol_type = other RNA
ggcatcccacgcagggtgag

SEQ ID NO: 12256 - RNA, 20 nt, synthetic construct
  source 1..20: mol_type = other RNA
gattacgcgcagagggaaga

SEQ ID NO: 12257 - RNA, 20 nt, synthetic construct
  source 1..20: mol_type = other RNA
gggggttccgttaatgttta

SEQ ID NO: 12258 - RNA, 20 nt, synthetic construct
  source 1..20: mol_type = other RNA
gatggggctctggtggcgtg

SEQ ID NO: 12259 - RNA, 20 nt, synthetic construct
  source 1..20: mol_type = other RNA
agcacccacaccctagaagg

SEQ ID NO: 12260 - RNA, 20 nt, synthetic construct
  source 1..20: mol_type = other RNA
ctgcggaaaccttctagggt

SEQ ID NO: 12261 - RNA, 20 nt, synthetic construct
  source 1..20: mol_type = other RNA
aggcgctcatggttgcaggc

SEQ ID NO: 12262 - RNA, 20 nt, synthetic construct
  source 1..20: mol_type = other RNA
gagcctggaggagtgagcca

SEQ ID NO: 12263 - RNA, 20 nt, synthetic construct
  source 1..20: mol_type = other RNA
cactgcctggctcactcctc

SEQ ID NO: 12264 - RNA, 20 nt, synthetic construct
  source 1..20: mol_type = other RNA
cggcccgcccgagccagtct

SEQ ID NO: 12265 - RNA, 20 nt, synthetic construct
  source 1..20: mol_type = other RNA
ttgcagcagcggctcccagc

SEQ ID NO: 12266 - RNA, 20 nt, synthetic construct
  source 1..20: mol_type = other RNA
tccccaccgcaaggctcaag

SEQ ID NO: 12267 - RNA, 20 nt, synthetic construct
  source 1..20: mol_type = other RNA
acgccggcggcgccttgagc

SEQ ID NO: 12268 - RNA, 20 nt, synthetic construct
  source 1..20: mol_type = other RNA
cctcgccaggacagcaacct

SEQ ID NO: 12269 - RNA, 20 nt, synthetic construct
  source 1..20: mol_type = other RNA
tggcgaggagacctagaggc

SEQ ID NO: 12270 - RNA, 20 nt, synthetic construct
  source 1..20: mol_type = other RNA
gctccaggcggtcctggtgg

SEQ ID NO: 12271 - RNA, 20 nt, synthetic construct
  source 1..20: mol_type = other RNA
tggtggccgctgccactgct

SEQ ID NO: 12272 - RNA, 20 nt, synthetic construct
  source 1..20: mol_type = other RNA
cgcgggcgcccgtgcgcagg

SEQ ID NO: 12273 - RNA, 20 nt, synthetic construct
  source 1..20: mol_type = other RNA
tcctgcgcacgggcgcccgc

SEQ ID NO: 12274 - RNA, 20 nt, synthetic construct
  source 1..20: mol_type = other RNA
tcgtcctcctgcgcacgggc

SEQ ID NO: 12275 - RNA, 20 nt, synthetic construct
  source 1..20: mol_type = other RNA
ccgtcctcgtcctcctgcgc

SEQ ID NO: 12276 - RNA, 20 nt, synthetic construct
  source 1..20: mol_type = other RNA
tcctcggaacgcaaggctag

SEQ ID NO: 12277 - RNA, 20 nt, synthetic construct
  source 1..20: mol_type = other RNA
cggctgcgggttcgccccgg

SEQ ID NO: 12278 - RNA, 20 nt, synthetic construct
  source 1..20: mol_type = other RNA
ccgagggctcttcgcttggc

SEQ ID NO: 12279 - RNA, 20 nt, synthetic construct
  source 1..20: mol_type = other RNA
ccaagatcgtgccaagcgaa

SEQ ID NO: 12280 - RNA, 20 nt, synthetic construct
  source 1..20: mol_type = other RNA
tcccccgccgccttgcctgc

SEQ ID NO: 12281 - RNA, 20 nt, synthetic construct
  source 1..20: mol_type = other RNA
ccgctctccaccgtgctccc

SEQ ID NO: 12282 - RNA, 20 nt, synthetic construct
  source 1..20: mol_type = other RNA
ccaaagagccggccgtcccc

SEQ ID NO: 12283 - RNA, 20 nt, synthetic construct
  source 1..20: mol_type = other RNA
cccaaccccgcgaaccttcc

SEQ ID NO: 12284 - RNA, 20 nt, synthetic construct
  source 1..20: mol_type = other RNA
cgggtagggccttctctcca

SEQ ID NO: 12285 - RNA, 20 nt, synthetic construct
  source 1..20: mol_type = other RNA
ttcccaccccgcccctgtct

SEQ ID NO: 12286 - RNA, 20 nt, synthetic construct
  source 1..20: mol_type = other RNA
taaagaaattgcctcgtgct

SEQ ID NO: 12287 - RNA, 20 nt, synthetic construct
  source 1..20: mol_type = other RNA
tttaggactcaggcagggaa

SEQ ID NO: 12288 - RNA, 20 nt, synthetic construct
  source 1..20: mol_type = other RNA
taaaggacgccaatgggcct

SEQ ID NO: 12289 - RNA, 20 nt, synthetic construct
  source 1..20: mol_type = other RNA
cagtaccaggcgcaccacct

SEQ ID NO: 12290 - RNA, 20 nt, synthetic construct
  source 1..20: mol_type = other RNA
gccgaccgtgtgcggggcga

SEQ ID NO: 12291 - RNA, 20 nt, synthetic construct
  source 1..20: mol_type = other RNA
gcagacagccaggtgggctg

SEQ ID NO: 12292 - RNA, 20 nt, synthetic construct
  source 1..20: mol_type = other RNA
cgccccgggaagaagcttcc

SEQ ID NO: 12293 - RNA, 20 nt, synthetic construct
  source 1..20: mol_type = other RNA
tgggctggtaatacttagaa

SEQ ID NO: 12294 - RNA, 20 nt, synthetic construct
  source 1..20: mol_type = other RNA
cccagcttggagtcagatgt

SEQ ID NO: 12295 - RNA, 20 nt, synthetic construct
  source 1..20: mol_type = other RNA
gatgtggggttgaatcttgg

SEQ ID NO: 12296 - RNA, 20 nt, synthetic construct
  source 1..20: mol_type = other RNA
agcaccacagctagtgagag

SEQ ID NO: 12297 - RNA, 20 nt, synthetic construct
  source 1..20: mol_type = other RNA
cttatccttgagcctccatt

SEQ ID NO: 12298 - RNA, 20 nt, synthetic construct
  source 1..20: mol_type = other RNA
cctcccttttaaagattagg

SEQ ID NO: 12299 - RNA, 20 nt, synthetic construct
  source 1..20: mol_type = other RNA
ctacggctcagtggcagcag

SEQ ID NO: 12300 - RNA, 20 nt, synthetic construct
  source 1..20: mol_type = other RNA
acagaactttcccttcatct

SEQ ID NO: 12301 - RNA, 20 nt, synthetic construct
  source 1..20: mol_type = other RNA
ctgtctgcagtgtgacctgt

SEQ ID NO: 12302 - RNA, 20 nt, synthetic construct
  source 1..20: mol_type = other RNA
gcagtgtgacctgttggtga

SEQ ID NO: 12303 - RNA, 20 nt, synthetic construct
  source 1..20: mol_type = other RNA
cactgcagacagggacaaaa

SEQ ID NO: 12304 - RNA, 20 nt, synthetic construct
  source 1..20: mol_type = other RNA
ccaacaggtcacactgcaga

SEQ ID NO: 12305 - RNA, 20 nt, synthetic construct
  source 1..20: mol_type = other RNA
ttgctccaaaccacagctcc

SEQ ID NO: 12306 - RNA, 20 nt, synthetic construct
  source 1..20: mol_type = other RNA
gagtgtgctgggtggcagga

SEQ ID NO: 12307 - RNA, 20 nt, synthetic construct
  source 1..20: mol_type = other RNA
ttactcagctcagtatagcc

SEQ ID NO: 12308 - RNA, 20 nt, synthetic construct
  source 1..20: mol_type = other RNA
aaggctcagggaacaaggaa

SEQ ID NO: 12309 - RNA, 20 nt, synthetic construct
  source 1..20: mol_type = other RNA
tacagcctctgcttactcac

SEQ ID NO: 12310 - RNA, 20 nt, synthetic construct
  source 1..20: mol_type = other RNA
aaaaattattttctgcttgc

SEQ ID NO: 12311 - RNA, 20 nt, synthetic construct
  source 1..20: mol_type = other RNA
tgagaaactgaggcccagag

SEQ ID NO: 12312 - RNA, 20 nt, synthetic construct
  source 1..20: mol_type = other RNA
ccccaggtgcattagaactg

SEQ ID NO: 12313 - RNA, 20 nt, synthetic construct
  source 1..20: mol_type = other RNA
gttctggaaacccagttcta

SEQ ID NO: 12314 - RNA, 20 nt, synthetic construct
  source 1..20: mol_type = other RNA
ttgaagcattagtaggagtt

SEQ ID NO: 12315 - RNA, 20 nt, synthetic construct
  source 1..20: mol_type = other RNA
tgagaattttattctaggat

SEQ ID NO: 12316 - RNA, 20 nt, synthetic construct
  source 1..20: mol_type = other RNA
acagttctttttcttttttt

SEQ ID NO: 12317 - RNA, 20 nt, synthetic construct
  source 1..20: mol_type = other RNA
cagctcactgcaacatctgt

SEQ ID NO: 12318 - RNA, 20 nt, synthetic construct
  source 1..20: mol_type = other RNA
cccgggttcaagtggttctc

SEQ ID NO: 12319 - RNA, 20 nt, synthetic construct
  source 1..20: mol_type = other RNA
caaactcctgacctcctcag

SEQ ID NO: 12320 - RNA, 20 nt, synthetic construct
  source 1..20: mol_type = other RNA
ggagtttgcgactagcctgg

SEQ ID NO: 12321 - RNA, 20 nt, synthetic construct
  source 1..20: mol_type = other RNA
gaaatgtaaaatgttacgaa

SEQ ID NO: 12322 - RNA, 20 nt, synthetic construct
  source 1..20: mol_type = other RNA
ggtgctaccatcaaataaat

SEQ ID NO: 12323 - RNA, 20 nt, synthetic construct
  source 1..20: mol_type = other RNA
gttcacgtcaggtgctacca

SEQ ID NO: 12324 - RNA, 20 nt, synthetic construct
  source 1..20: mol_type = other RNA
gcttggaagaatctggagct

SEQ ID NO: 12325 - RNA, 20 nt, synthetic construct
  source 1..20: mol_type = other RNA
accccctttacccaaagcct

SEQ ID NO: 12326 - RNA, 20 nt, synthetic construct
  source 1..20: mol_type = other RNA
gagtagaacagagtccaccc

SEQ ID NO: 12327 - RNA, 20 nt, synthetic construct
  source 1..20: mol_type = other RNA
aagatgcatatatacagaga

SEQ ID NO: 12328 - RNA, 20 nt, synthetic construct
  source 1..20: mol_type = other RNA
aaactccatgctcctccttg

SEQ ID NO: 12329 - RNA, 20 nt, synthetic construct
  source 1..20: mol_type = other RNA
gcctgagagcagttggagca

SEQ ID NO: 12330 - RNA, 20 nt, synthetic construct
  source 1..20: mol_type = other RNA
gctccaactgctctcaggca

SEQ ID NO: 12331 - RNA, 20 nt, synthetic construct
  source 1..20: mol_type = other RNA
cctccaaatctcatgtggaa

SEQ ID NO: 12332 - RNA, 20 nt, synthetic construct
  source 1..20: mol_type = other RNA
tcagtgttggaagtggggcc

SEQ ID NO: 12333 - RNA, 20 nt, synthetic construct
  source 1..20: mol_type = other RNA
tgggggaggaacccctgtga

SEQ ID NO: 12334 - RNA, 20 nt, synthetic construct
  source 1..20: mol_type = other RNA
ttgtgataatgagtaagttc

SEQ ID NO: 12335 - RNA, 20 nt, synthetic construct
  source 1..20: mol_type = other RNA
ttttgtgttgctatataaag

SEQ ID NO: 12336 - RNA, 20 nt, synthetic construct
  source 1..20: mol_type = other RNA
tagtccttttgtgttgctat

SEQ ID NO: 12337 - RNA, 20 nt, synthetic construct
  source 1..20: mol_type = other RNA
aggccactgtcttagtcctt

SEQ ID NO: 12338 - RNA, 20 nt, synthetic construct
  source 1..20: mol_type = other RNA
tcccttctgcctgcatttgt

SEQ ID NO: 12339 - RNA, 20 nt, synthetic construct
  source 1..20: mol_type = other RNA
ctcttgactttcccagcagg

SEQ ID NO: 12340 - RNA, 20 nt, synthetic construct
  source 1..20: mol_type = other RNA
agagtgacggttatataaat

SEQ ID NO: 12341 - RNA, 20 nt, synthetic construct
  source 1..20: mol_type = other RNA
taggtactgtggtctctaca

SEQ ID NO: 12342 - RNA, 20 nt, synthetic construct
  source 1..20: mol_type = other RNA
ctacaatacagcagaggtat

SEQ ID NO: 12343 - RNA, 20 nt, synthetic construct
  source 1..20: mol_type = other RNA
ctcaacctctcggagcctca

SEQ ID NO: 12344 - RNA, 20 nt, synthetic construct
  source 1..20: mol_type = other RNA
acggtttcctggctccaaag

SEQ ID NO: 12345 - RNA, 20 nt, synthetic construct
  source 1..20: mol_type = other RNA
gaataaattgagggaaaaaa

SEQ ID NO: 12346 - RNA, 20 nt, synthetic construct
  source 1..20: mol_type = other RNA
ctcctggtggccctgcccaa

SEQ ID NO: 12347 - RNA, 20 nt, synthetic construct
  source 1..20: mol_type = other RNA
agtgtggcccgtagttccca

SEQ ID NO: 12348 - RNA, 20 nt, synthetic construct
  source 1..20: mol_type = other RNA
gcatttggtaacttctttat

SEQ ID NO: 12349 - RNA, 20 nt, synthetic construct
  source 1..20: mol_type = other RNA
cttttgttgtaatttgtaag

SEQ ID NO: 12350 - RNA, 20 nt, synthetic construct
  source 1..20: mol_type = other RNA
tcatgttcctccttgcatgg

SEQ ID NO: 12351 - RNA, 20 nt, synthetic construct
  source 1..20: mol_type = other RNA
cctccttcagcaccaccacg

SEQ ID NO: 12352 - RNA, 20 nt, synthetic construct
  source 1..20: mol_type = other RNA
gagcgcactgcccgccgcct

SEQ ID NO: 12353 - RNA, 20 nt, synthetic construct
  source 1..20: mol_type = other RNA
tccatggccttcttcctggc

SEQ ID NO: 12354 - RNA, 20 nt, synthetic construct
  source 1..20: mol_type = other RNA
ccactcatcttcaccaggaa

SEQ ID NO: 12355 - RNA, 20 nt, synthetic construct
  source 1..20: mol_type = other RNA
ccagtgtatatgcagtggcc

SEQ ID NO: 12356 - RNA, 20 nt, synthetic construct
  source 1..20: mol_type = other RNA
ccttctgattttcagcaatg

SEQ ID NO: 12357 - RNA, 20 nt, synthetic construct
  source 1..20: mol_type = other RNA
atcttcatttgaaagacgag

SEQ ID NO: 12358 - RNA, 20 nt, synthetic construct
  source 1..20: mol_type = other RNA
ttcaaatgaagatagacgta

SEQ ID NO: 12359 - RNA, 20 nt, synthetic construct
  source 1..20: mol_type = other RNA
cctcgtctttcaaatgaaga

SEQ ID NO: 12360 - RNA, 20 nt, synthetic construct
  source 1..20: mol_type = other RNA
cctctgaacttcagtctcct

SEQ ID NO: 12361 - RNA, 20 nt, synthetic construct
  source 1..20: mol_type = other RNA
gtgtggtcccctctgaactt

SEQ ID NO: 12362 - RNA, 20 nt, synthetic construct
  source 1..20: mol_type = other RNA
gcctgccagccattcttgtg

SEQ ID NO: 12363 - RNA, 20 nt, synthetic construct
  source 1..20: mol_type = other RNA
ctacaggtttccgtaggcag

SEQ ID NO: 12364 - RNA, 20 nt, synthetic construct
  source 1..20: mol_type = other RNA
ttttataaaaaagcatgact

SEQ ID NO: 12365 - RNA, 20 nt, synthetic construct
  source 1..20: mol_type = other RNA
tgcttttttataaaatgact

SEQ ID NO: 12366 - RNA, 20 nt, synthetic construct
  source 1..20: mol_type = other RNA
aaaattcctttgaagctgtt

SEQ ID NO: 12367 - RNA, 20 nt, synthetic construct
  source 1..20: mol_type = other RNA
cttctttaggacagggtggc

SEQ ID NO: 12368 - RNA, 20 nt, synthetic construct
  source 1..20: mol_type = other RNA
taaagaagggacttcactct

SEQ ID NO: 12369 - RNA, 20 nt, synthetic construct
  source 1..20: mol_type = other RNA
catcttcggtggaggggcag

SEQ ID NO: 12370 - RNA, 20 nt, synthetic construct
  source 1..20: mol_type = other RNA
cctttctgcccctccaccga

SEQ ID NO: 12371 - RNA, 20 nt, synthetic construct
  source 1..20: mol_type = other RNA
ttttcacactgattctccac

SEQ ID NO: 12372 - RNA, 20 nt, synthetic construct
  source 1..20: mol_type = other RNA
gcaggaggctaagaagcacc

SEQ ID NO: 12373 - RNA, 20 nt, synthetic construct
  source 1..20: mol_type = other RNA
tgtccaaggtcacacagcgt

SEQ ID NO: 12374 - RNA, 20 nt, synthetic construct
  source 1..20: mol_type = other RNA
aaggtcacacagcgtgtaat

SEQ ID NO: 12375 - RNA, 20 nt, synthetic construct
  source 1..20: mol_type = other RNA
cacagcgtgtaatgggcagg

SEQ ID NO: 12376 - RNA, 20 nt, synthetic construct
  source 1..20: mol_type = other RNA
gagtctggagtctggacctg

SEQ ID NO: 12377 - RNA, 20 nt, synthetic construct
  source 1..20: mol_type = other RNA
ggagtctggacctgggtctc

SEQ ID NO: 12378 - RNA, 20 nt, synthetic construct
  source 1..20: mol_type = other RNA
ggacctgggtctcctagctg

SEQ ID NO: 12379 - RNA, 20 nt, synthetic construct
  source 1..20: mol_type = other RNA
agactccagactctgaccct

SEQ ID NO: 12380 - RNA, 20 nt, synthetic construct
  source 1..20: mol_type = other RNA
cctagctgcactgcactgct

SEQ ID NO: 12381 - RNA, 20 nt, synthetic construct
  source 1..20: mol_type = other RNA
tggcgccacaggccttggta

SEQ ID NO: 12382 - RNA, 20 nt, synthetic construct
  source 1..20: mol_type = other RNA
atccctgtcatggcgccaca

SEQ ID NO: 12383 - RNA, 20 nt, synthetic construct
  source 1..20: mol_type = other RNA
ctgccttggaaacccgtagt

SEQ ID NO: 12384 - RNA, 20 nt, synthetic construct
  source 1..20: mol_type = other RNA
aagtagaggagactgacaag

SEQ ID NO: 12385 - RNA, 20 nt, synthetic construct
  source 1..20: mol_type = other RNA
cctctacttagactacgggt

SEQ ID NO: 12386 - RNA, 20 nt, synthetic construct
  source 1..20: mol_type = other RNA
gtctcctctacttagactac

SEQ ID NO: 12387 - RNA, 20 nt, synthetic construct
  source 1..20: mol_type = other RNA
atgccttccatcagtctgct

SEQ ID NO: 12388 - RNA, 20 nt, synthetic construct
  source 1..20: mol_type = other RNA
gctcaacacacgtttaccaa

SEQ ID NO: 12389 - RNA, 20 nt, synthetic construct
  source 1..20: mol_type = other RNA
tcttcgcctctgcagcacac

SEQ ID NO: 12390 - RNA, 20 nt, synthetic construct
  source 1..20: mol_type = other RNA
ctcctcctgaactgtaagct

SEQ ID NO: 12391 - RNA, 20 nt, synthetic construct
  source 1..20: mol_type = other RNA
gtctctcctcctgaactgta

SEQ ID NO: 12392 - RNA, 20 nt, synthetic construct
  source 1..20: mol_type = other RNA
ctggtcagtctctcctcctg

SEQ ID NO: 12393 - RNA, 20 nt, synthetic construct
  source 1..20: mol_type = other RNA
actgtactggcagtcactgg

SEQ ID NO: 12394 - RNA, 20 nt, synthetic construct
  source 1..20: mol_type = other RNA
catagtcaactgtactggca

SEQ ID NO: 12395 - RNA, 20 nt, synthetic construct
  source 1..20: mol_type = other RNA
ctccccaaggctgagcacat

SEQ ID NO: 12396 - RNA, 20 nt, synthetic construct
  source 1..20: mol_type = other RNA
tctggtgctatacgggtacc

SEQ ID NO: 12397 - RNA, 20 nt, synthetic construct
  source 1..20: mol_type = other RNA
agctctcgatggcaaatgcc

SEQ ID NO: 12398 - RNA, 20 nt, synthetic construct
  source 1..20: mol_type = other RNA
tgcccagccccttattggct

SEQ ID NO: 12399 - RNA, 20 nt, synthetic construct
  source 1..20: mol_type = other RNA
aaccctgagcaaatcccttc

SEQ ID NO: 12400 - RNA, 20 nt, synthetic construct
  source 1..20: mol_type = other RNA
ttaaatgaatgttccaatta

SEQ ID NO: 12401 - RNA, 20 nt, synthetic construct
  source 1..20: mol_type = other RNA
tgaagcattcagcagatgct

SEQ ID NO: 12402 - RNA, 20 nt, synthetic construct
  source 1..20: mol_type = other RNA
ctggatgccttcgtatcccc

SEQ ID NO: 12403 - RNA, 20 nt, synthetic construct
  source 1..20: mol_type = other RNA
gaagggtaaggagagggaat

SEQ ID NO: 12404 - RNA, 20 nt, synthetic construct
  source 1..20: mol_type = other RNA
ggaggtagggagggagtggg

SEQ ID NO: 12405 - RNA, 20 nt, synthetic construct
  source 1..20: mol_type = other RNA
caaaaaaaaaaaaaaatggt

SEQ ID NO: 12406 - RNA, 20 nt, synthetic construct
  source 1..20: mol_type = other RNA
gggcaacagagtctcaaaaa

SEQ ID NO: 12407 - RNA, 20 nt, synthetic construct
  source 1..20: mol_type = other RNA
cagctactcgggaggctgag

SEQ ID NO: 12408 - RNA, 20 nt, synthetic construct
  source 1..20: mol_type = other RNA
cgaactctcgacctcaggtg

SEQ ID NO: 12409 - RNA, 20 nt, synthetic construct
  source 1..20: mol_type = other RNA
agagttcgagaccagcctgg

SEQ ID NO: 12410 - RNA, 20 nt, synthetic construct
  source 1..20: mol_type = other RNA
ccgctcccagctgctgatgc

SEQ ID NO: 12411 - RNA, 20 nt, synthetic construct
  source 1..20: mol_type = other RNA
ttctaactcctgctagtgcc

SEQ ID NO: 12412 - RNA, 20 nt, synthetic construct
  source 1..20: mol_type = other RNA
attctccagccttctccagc

SEQ ID NO: 12413 - RNA, 20 nt, synthetic construct
  source 1..20: mol_type = other RNA
cctagtctattctccagcct

SEQ ID NO: 12414 - RNA, 20 nt, synthetic construct
  source 1..20: mol_type = other RNA
tgatttaggcatggagtcca

SEQ ID NO: 12415 - RNA, 20 nt, synthetic construct
  source 1..20: mol_type = other RNA
agggcctgagcttcactcca

SEQ ID NO: 12416 - RNA, 20 nt, synthetic construct
  source 1..20: mol_type = other RNA
atcctgcccagagccttggc

SEQ ID NO: 12417 - RNA, 20 nt, synthetic construct
  source 1..20: mol_type = other RNA
gggagccaggctgtgccaag

SEQ ID NO: 12418 - RNA, 20 nt, synthetic construct
  source 1..20: mol_type = other RNA
agttcagaatccttcctaaa

SEQ ID NO: 12419 - RNA, 20 nt, synthetic construct
  source 1..20: mol_type = other RNA
ggcatagaggattcctttta

SEQ ID NO: 12420 - RNA, 20 nt, synthetic construct
  source 1..20: mol_type = other RNA
gtcctccggggcactagcag

SEQ ID NO: 12421 - RNA, 20 nt, synthetic construct
  source 1..20: mol_type = other RNA
tccggggcactagcagggac

SEQ ID NO: 12422 - RNA, 20 nt, synthetic construct
  source 1..20: mol_type = other RNA
ctgctagtgccccggaggac

SEQ ID NO: 12423 - RNA, 20 nt, synthetic construct
  source 1..20: mol_type = other RNA
ccacatcccagcccagcagc

SEQ ID NO: 12424 - RNA, 20 nt, synthetic construct
  source 1..20: mol_type = other RNA
aaatggcttaagcagagtcc

SEQ ID NO: 12425 - RNA, 20 nt, synthetic construct
  source 1..20: mol_type = other RNA
cccggcctctctggcttctg

SEQ ID NO: 12426 - RNA, 20 nt, synthetic construct
  source 1..20: mol_type = other RNA
actacatcgaggaggactcc

SEQ ID NO: 12427 - RNA, 20 nt, synthetic construct
  source 1..20: mol_type = other RNA
acatggggcaacttcaaggc

SEQ ID NO: 12428 - RNA, 20 nt, synthetic construct
  source 1..20: mol_type = other RNA
tcctcgatgtagtcgacatg

SEQ ID NO: 12429 - RNA, 20 nt, synthetic construct
  source 1..20: mol_type = other RNA
ttgcccagagcatcccgtgg

SEQ ID NO: 12430 - RNA, 20 nt, synthetic construct
  source 1..20: mol_type = other RNA
taccggggggctggtattca

SEQ ID NO: 12431 - RNA, 20 nt, synthetic construct
  source 1..20: mol_type = other RNA
caaagccccccgagaagtgg

SEQ ID NO: 12432 - RNA, 20 nt, synthetic construct
  source 1..20: mol_type = other RNA
gtggaggtgctgagtcccaa

SEQ ID NO: 12433 - RNA, 20 nt, synthetic construct
  source 1..20: mol_type = other RNA
catccccatcccctgcagcc

SEQ ID NO: 12434 - RNA, 20 nt, synthetic construct
  source 1..20: mol_type = other RNA
tgccttaaatgatcctcttt

SEQ ID NO: 12435 - RNA, 20 nt, synthetic construct
  source 1..20: mol_type = other RNA
ccatcagatgaaccctcctt

SEQ ID NO: 12436 - RNA, 20 nt, synthetic construct
  source 1..20: mol_type = other RNA
gcagggcactgggagttata

SEQ ID NO: 12437 - RNA, 20 nt, synthetic construct
  source 1..20: mol_type = other RNA
agtctgcagggcactgggag

SEQ ID NO: 12438 - RNA, 20 nt, synthetic construct
  source 1..20: mol_type = other RNA
atcccattaaaggatctggt

SEQ ID NO: 12439 - RNA, 20 nt, synthetic construct
  source 1..20: mol_type = other RNA
gggatgcctctgcctacctt

SEQ ID NO: 12440 - RNA, 20 nt, synthetic construct
  source 1..20: mol_type = other RNA
tccctctaggcctttctttc

SEQ ID NO: 12441 - RNA, 20 nt, synthetic construct
  source 1..20: mol_type = other RNA
gcattctagcagggacttgc

SEQ ID NO: 12442 - RNA, 20 nt, synthetic construct
  source 1..20: mol_type = other RNA
ctgctagaatgcagaccgtt

SEQ ID NO: 12443 - RNA, 20 nt, synthetic construct
  source 1..20: mol_type = other RNA
gggaagactctagatgcacc

SEQ ID NO: 12444 - RNA, 20 nt, synthetic construct
  source 1..20: mol_type = other RNA
tccccgactgaattgccacc

SEQ ID NO: 12445 - RNA, 20 nt, synthetic construct
  source 1..20: mol_type = other RNA
aactagaacccttcattctc

SEQ ID NO: 12446 - RNA, 20 nt, synthetic construct
  source 1..20: mol_type = other RNA
ggagctcagcgcagagatga

SEQ ID NO: 12447 - RNA, 20 nt, synthetic construct
  source 1..20: mol_type = other RNA
atgcaacatggtgccaggac

SEQ ID NO: 12448 - RNA, 20 nt, synthetic construct
  source 1..20: mol_type = other RNA
tggcaccatgttgcatggac

SEQ ID NO: 12449 - RNA, 20 nt, synthetic construct
  source 1..20: mol_type = other RNA
ttcttgtctgtaaaatgggc

SEQ ID NO: 12450 - RNA, 20 nt, synthetic construct
  source 1..20: mol_type = other RNA
gtaaaatgggcacataaccc

SEQ ID NO: 12451 - RNA, 20 nt, synthetic construct
  source 1..20: mol_type = other RNA
ctgtccttctcacaggttgc

SEQ ID NO: 12452 - RNA, 20 nt, synthetic construct
  source 1..20: mol_type = other RNA
ttctcacaggttgctgtgag

SEQ ID NO: 12453 - RNA, 20 nt, synthetic construct
  source 1..20: mol_type = other RNA
cacagcaacctgtgagaagg

SEQ ID NO: 12454 - RNA, 20 nt, synthetic construct
  source 1..20: mol_type = other RNA
cacagtagccccccaacttt

SEQ ID NO: 12455 - RNA, 20 nt, synthetic construct
  source 1..20: mol_type = other RNA
cacagtttgggtgtatgcaa

SEQ ID NO: 12456 - RNA, 20 nt, synthetic construct
  source 1..20: mol_type = other RNA
gagttgctgccattgcaaca

SEQ ID NO: 12457 - RNA, 20 nt, synthetic construct
  source 1..20: mol_type = other RNA
cccacacaaaccctttctcc

SEQ ID NO: 12458 - RNA, 20 nt, synthetic construct
  source 1..20: mol_type = other RNA
gtcatgtgtgctgacccggc

SEQ ID NO: 12459 - RNA, 20 nt, synthetic construct
  source 1..20: mol_type = other RNA
tgtgtgctgacccggcctgg

SEQ ID NO: 12460 - RNA, 20 nt, synthetic construct
  source 1..20: mol_type = other RNA
gcacacatgaccgaccaggc

SEQ ID NO: 12461 - RNA, 20 nt, synthetic construct
  source 1..20: mol_type = other RNA
tctccctggccacaggctgc

SEQ ID NO: 12462 - RNA, 20 nt, synthetic construct
  source 1..20: mol_type = other RNA
cacctggttggaaaggaaca

SEQ ID NO: 12463 - RNA, 20 nt, synthetic construct
  source 1..20: mol_type = other RNA
ctgaggcactgatgtggagt

SEQ ID NO: 12464 - RNA, 20 nt, synthetic construct
  source 1..20: mol_type = other RNA
ctgatattagcctgctccgg

SEQ ID NO: 12465 - RNA, 20 nt, synthetic construct
  source 1..20: mol_type = other RNA
ctcttggtctctgatattag

SEQ ID NO: 12466 - RNA, 20 nt, synthetic construct
  source 1..20: mol_type = other RNA
ctgtgatcctctgccagtgt

SEQ ID NO: 12467 - RNA, 20 nt, synthetic construct
  source 1..20: mol_type = other RNA
aggcagggactgagaagatc

SEQ ID NO: 12468 - RNA, 20 nt, synthetic construct
  source 1..20: mol_type = other RNA
ctgcctggactggggtctct

SEQ ID NO: 12469 - RNA, 20 nt, synthetic construct
  source 1..20: mol_type = other RNA
cagcagtgctaggaaactaa

SEQ ID NO: 12470 - RNA, 20 nt, synthetic construct
  source 1..20: mol_type = other RNA
tggaggccagaagcctgaat

SEQ ID NO: 12471 - RNA, 20 nt, synthetic construct
  source 1..20: mol_type = other RNA
gcaggaccactttctcccgg

SEQ ID NO: 12472 - RNA, 20 nt, synthetic construct
  source 1..20: mol_type = other RNA
tgccgacactgattcaggct

SEQ ID NO: 12473 - RNA, 20 nt, synthetic construct
  source 1..20: mol_type = other RNA
caacagcggcagcacaccaa

SEQ ID NO: 12474 - RNA, 20 nt, synthetic construct
  source 1..20: mol_type = other RNA
tcacacagccttctctgtgt

SEQ ID NO: 12475 - RNA, 20 nt, synthetic construct
  source 1..20: mol_type = other RNA
ctctcctcttcattgtctca

SEQ ID NO: 12476 - RNA, 20 nt, synthetic construct
  source 1..20: mol_type = other RNA
cataaggacacttgtcattg

SEQ ID NO: 12477 - RNA, 20 nt, synthetic construct
  source 1..20: mol_type = other RNA
ttatgagacaatgaagagga

SEQ ID NO: 12478 - RNA, 20 nt, synthetic construct
  source 1..20: mol_type = other RNA
ttggatttagggcccactgg

SEQ ID NO: 12479 - RNA, 20 nt, synthetic construct
  source 1..20: mol_type = other RNA
ttgcagatgtggttaaggtt

SEQ ID NO: 12480 - RNA, 20 nt, synthetic construct
  source 1..20: mol_type = other RNA
cagccacaggttgtgggggt

SEQ ID NO: 12481 - RNA, 20 nt, synthetic construct
  source 1..20: mol_type = other RNA
gcttctggcccaagggagag

SEQ ID NO: 12482 - RNA, 20 nt, synthetic construct
  source 1..20: mol_type = other RNA
gtgggaggtggcaggaatgg

SEQ ID NO: 12483 - RNA, 20 nt, synthetic construct
  source 1..20: mol_type = other RNA
tatcaagggcttggctggag

SEQ ID NO: 12484 - RNA, 20 nt, synthetic construct
  source 1..20: mol_type = other RNA
tcctggagctgttgggctgg

SEQ ID NO: 12485 - RNA, 20 nt, synthetic construct
  source 1..20: mol_type = other RNA
gggtttgagggcggcagcca

SEQ ID NO: 12486 - RNA, 20 nt, synthetic construct
  source 1..20: mol_type = other RNA
cacagttaagagtgcagggt

SEQ ID NO: 12487 - RNA, 20 nt, synthetic construct
  source 1..20: mol_type = other RNA
ctcaccctctctgatcttca

SEQ ID NO: 12488 - RNA, 20 nt, synthetic construct
  source 1..20: mol_type = other RNA
ggtattgagtgaggtgctgt

SEQ ID NO: 12489 - RNA, 20 nt, synthetic construct
  source 1..20: mol_type = other RNA
cttcccccaacagtgtatcc

SEQ ID NO: 12490 - RNA, 20 nt, synthetic construct
  source 1..20: mol_type = other RNA
agtagcatttgtttaaggaa

SEQ ID NO: 12491 - RNA, 20 nt, synthetic construct
  source 1..20: mol_type = other RNA
tggctagaacagcgcttcct

SEQ ID NO: 12492 - RNA, 20 nt, synthetic construct
  source 1..20: mol_type = other RNA
cctttgcctggttaataatg

SEQ ID NO: 12493 - RNA, 20 nt, synthetic construct
  source 1..20: mol_type = other RNA
aagcagtggaatgaacgtgg

SEQ ID NO: 12494 - RNA, 20 nt, synthetic construct
  source 1..20: mol_type = other RNA
cttctgcacaggccacactc

SEQ ID NO: 12495 - RNA, 20 nt, synthetic construct
  source 1..20: mol_type = other RNA
caccagcctcggtcccttct

SEQ ID NO: 12496 - RNA, 20 nt, synthetic construct
  source 1..20: mol_type = other RNA
gatgtgaaaggaagaacttg

SEQ ID NO: 12497 - RNA, 20 nt, synthetic construct
  source 1..20: mol_type = other RNA
gagcttctcaggcgtatggc

SEQ ID NO: 12498 - RNA, 20 nt, synthetic construct
  source 1..20: mol_type = other RNA
tgcttgcatacctccagagc

SEQ ID NO: 12499 - RNA, 20 nt, synthetic construct
  source 1..20: mol_type = other RNA
cagggaactagcagcccctg

SEQ ID NO: 12500 - RNA, 20 nt, synthetic construct
  source 1..20: mol_type = other RNA
catccgagctgggccccttt

SEQ ID NO: 12501 - RNA, 20 nt, synthetic construct
  source 1..20: mol_type = other RNA
ggaggctgcaagcatggcca

SEQ ID NO: 12502 - RNA, 20 nt, synthetic construct
  source 1..20: mol_type = other RNA
cagcaggacagtgggctggt

SEQ ID NO: 12503 - RNA, 20 nt, synthetic construct
  source 1..20: mol_type = other RNA
tgctgggacagggtcaggag

SEQ ID NO: 12504 - RNA, 20 nt, synthetic construct
  source 1..20: mol_type = other RNA
catccctgggcctggggtgt

SEQ ID NO: 12505 - RNA, 20 nt, synthetic construct
  source 1..20: mol_type = other RNA
catcatcttgcagcagaacc

SEQ ID NO: 12506 - RNA, 20 nt, synthetic construct
  source 1..20: mol_type = other RNA
caagcacgggtgggaccaga

SEQ ID NO: 12507 - RNA, 20 nt, synthetic construct
  source 1..20: mol_type = other RNA
cacccgtgcttgggaccacc

SEQ ID NO: 12508 - RNA, 20 nt, synthetic construct
  source 1..20: mol_type = other RNA
tttctggtcccacccgtgct

SEQ ID NO: 12509 - RNA, 20 nt, synthetic construct
  source 1..20: mol_type = other RNA
tgtgtgaggagggaactgag

SEQ ID NO: 12510 - RNA, 20 nt, synthetic construct
  source 1..20: mol_type = other RNA
atgttcctcgtcgtgtgtga

SEQ ID NO: 12511 - RNA, 20 nt, synthetic construct
  source 1..20: mol_type = other RNA
agggagggaagcagcctctg

SEQ ID NO: 12512 - RNA, 20 nt, synthetic construct
  source 1..20: mol_type = other RNA
tctagataagcctgtattcc

SEQ ID NO: 12513 - RNA, 20 nt, synthetic construct
  source 1..20: mol_type = other RNA
gccaatgtatccagttgtcc

SEQ ID NO: 12514 - RNA, 20 nt, synthetic construct
  source 1..20: mol_type = other RNA
cgtcagcctggaagctctga

SEQ ID NO: 12515 - RNA, 20 nt, synthetic construct
  source 1..20: mol_type = other RNA
gcctggaagctctgagggaa

SEQ ID NO: 12516 - RNA, 20 nt, synthetic construct
  source 1..20: mol_type = other RNA
gctcctagcagaggccccgg

SEQ ID NO: 12517 - RNA, 20 nt, synthetic construct
  source 1..20: mol_type = other RNA
tgtgtctgccccttcgacat

SEQ ID NO: 12518 - RNA, 20 nt, synthetic construct
  source 1..20: mol_type = other RNA
gccccttcgacattccatag

SEQ ID NO: 12519 - RNA, 20 nt, synthetic construct
  source 1..20: mol_type = other RNA
aaggggcagacacaagacaa

SEQ ID NO: 12520 - RNA, 20 nt, synthetic construct
  source 1..20: mol_type = other RNA
ccagatgtcttcaggtcgga

SEQ ID NO: 12521 - RNA, 20 nt, synthetic construct
  source 1..20: mol_type = other RNA
tcaggtcggagctcacagcg

SEQ ID NO: 12522 - RNA, 20 nt, synthetic construct
  source 1..20: mol_type = other RNA
gagctcacagcgctctcagc

SEQ ID NO: 12523 - RNA, 20 nt, synthetic construct
  source 1..20: mol_type = other RNA
ttgctctctgagtgtgttag

SEQ ID NO: 12524 - RNA, 20 nt, synthetic construct
  source 1..20: mol_type = other RNA
gcctctcctcccaggctgtg

SEQ ID NO: 12525 - RNA, 20 nt, synthetic construct
  source 1..20: mol_type = other RNA
ttggcagtctgcctctcctc

SEQ ID NO: 12526 - RNA, 20 nt, synthetic construct
  source 1..20: mol_type = other RNA
cgtgggcactttggtttctt

SEQ ID NO: 12527 - RNA, 20 nt, synthetic construct
  source 1..20: mol_type = other RNA
cggcaggaagctccactgat

SEQ ID NO: 12528 - RNA, 20 nt, synthetic construct
  source 1..20: mol_type = other RNA
accctgccctaaggcctcca

SEQ ID NO: 12529 - RNA, 20 nt, synthetic construct
  source 1..20: mol_type = other RNA
ccagcctgcacacacactgt

SEQ ID NO: 12530 - RNA, 20 nt, synthetic construct
  source 1..20: mol_type = other RNA
gaactgtgagtccccagcct

SEQ ID NO: 12531 - RNA, 20 nt, synthetic construct
  source 1..20: mol_type = other RNA
gggcacagtccgaactgtga

SEQ ID NO: 12532 - RNA, 20 nt, synthetic construct
  source 1..20: mol_type = other RNA
cgcatcctcccacccaccca

SEQ ID NO: 12533 - RNA, 20 nt, synthetic construct
  source 1..20: mol_type = other RNA
gcccccagtcccgcatcctc

SEQ ID NO: 12534 - RNA, 20 nt, synthetic construct
  source 1..20: mol_type = other RNA
gggtgtgtgtatctgtgggg

SEQ ID NO: 12535 - RNA, 20 nt, synthetic construct
  source 1..20: mol_type = other RNA
ggctcacaggctctgtctgg

SEQ ID NO: 12536 - RNA, 20 nt, synthetic construct
  source 1..20: mol_type = other RNA
ttgtagatgtaattaagcat

SEQ ID NO: 12537 - RNA, 20 nt, synthetic construct
  source 1..20: mol_type = other RNA
tgtgatgtgtctttatgaga

SEQ ID NO: 12538 - RNA, 20 nt, synthetic construct
  source 1..20: mol_type = other RNA
ttatgagagaaaggcagagg

SEQ ID NO: 12539 - RNA, 20 nt, synthetic construct
  source 1..20: mol_type = other RNA
aatctccctctgcctttctc

SEQ ID NO: 12540 - RNA, 20 nt, synthetic construct
  source 1..20: mol_type = other RNA
ccacgtggcccctcctgtgt

SEQ ID NO: 12541 - RNA, 20 nt, synthetic construct
  source 1..20: mol_type = other RNA
tccggcttctggtggctgct

SEQ ID NO: 12542 - RNA, 20 nt, synthetic construct
  source 1..20: mol_type = other RNA
gggaatttgtgaccgaagcc

SEQ ID NO: 12543 - RNA, 20 nt, synthetic construct
  source 1..20: mol_type = other RNA
caaattcccagactcagcag

SEQ ID NO: 12544 - RNA, 20 nt, synthetic construct
  source 1..20: mol_type = other RNA
tgagatgagaatctctactc

SEQ ID NO: 12545 - RNA, 20 nt, synthetic construct
  source 1..20: mol_type = other RNA
tctgaagtgccatctgaaca

SEQ ID NO: 12546 - RNA, 20 nt, synthetic construct
  source 1..20: mol_type = other RNA
cctgagtcttctgaagtgcc

SEQ ID NO: 12547 - RNA, 20 nt, synthetic construct
  source 1..20: mol_type = other RNA
aactgctcctgccccagggt

SEQ ID NO: 12548 - RNA, 20 nt, synthetic construct
  source 1..20: mol_type = other RNA
gtcaaactgctcctgcccca

SEQ ID NO: 12549 - RNA, 20 nt, synthetic construct
  source 1..20: mol_type = other RNA
tgcgccagcggaaatggcct

SEQ ID NO: 12550 - RNA, 20 nt, synthetic construct
  source 1..20: mol_type = other RNA
tcctttggcctggctgagag

SEQ ID NO: 12551 - RNA, 20 nt, synthetic construct
  source 1..20: mol_type = other RNA
cagaaactctcagccaggcc

SEQ ID NO: 12552 - RNA, 20 nt, synthetic construct
  source 1..20: mol_type = other RNA
agcctgctggatggagaagg

SEQ ID NO: 12553 - RNA, 20 nt, synthetic construct
  source 1..20: mol_type = other RNA
tgcatgggcgactcccccag

SEQ ID NO: 12554 - RNA, 20 nt, synthetic construct
  source 1..20: mol_type = other RNA
cccatgcaggacaaaggtta

SEQ ID NO: 12555 - RNA, 20 nt, synthetic construct
  source 1..20: mol_type = other RNA
cttgcagcttttaccccagt

SEQ ID NO: 12556 - RNA, 20 nt, synthetic construct
  source 1..20: mol_type = other RNA
ccgagcgcctaccctacact

SEQ ID NO: 12557 - RNA, 20 nt, synthetic construct
  source 1..20: mol_type = other RNA
caacctcagagaaaacagtc

SEQ ID NO: 12558 - RNA, 20 nt, synthetic construct
  source 1..20: mol_type = other RNA
ccgtgagccctcctggtatc

SEQ ID NO: 12559 - RNA, 20 nt, synthetic construct
  source 1..20: mol_type = other RNA
aagcgttctccactccacaa

SEQ ID NO: 12560 - RNA, 20 nt, synthetic construct
  source 1..20: mol_type = other RNA
gggcctcctggctccaggtc

SEQ ID NO: 12561 - RNA, 20 nt, synthetic construct
  source 1..20: mol_type = other RNA
gagctgcagcttcctgtctc

SEQ ID NO: 12562 - RNA, 20 nt, synthetic construct
  source 1..20: mol_type = other RNA
ctaaaatgagccggccagcg

SEQ ID NO: 12563 - RNA, 20 nt, synthetic construct
  source 1..20: mol_type = other RNA
ggccacctgcgctggccggc

SEQ ID NO: 12564 - RNA, 20 nt, synthetic construct
  source 1..20: mol_type = other RNA
ttaaatcttgttgtctttct

SEQ ID NO: 12565 - RNA, 20 nt, synthetic construct
  source 1..20: mol_type = other RNA
ttcttgcagactcggtgagc

SEQ ID NO: 12566 - RNA, 20 nt, synthetic construct
  source 1..20: mol_type = other RNA
gcaagaaagacaacaagatt

SEQ ID NO: 12567 - RNA, 20 nt, synthetic construct
  source 1..20: mol_type = other RNA
tcctgctccttcatatgaat

SEQ ID NO: 12568 - RNA, 20 nt, synthetic construct
  source 1..20: mol_type = other RNA
ttcttggcagtagcattgcc

SEQ ID NO: 12569 - RNA, 20 nt, synthetic construct
  source 1..20: mol_type = other RNA
aaggccatcagctggcaatg

SEQ ID NO: 12570 - RNA, 20 nt, synthetic construct
  source 1..20: mol_type = other RNA
atgaaatacattatagaata

SEQ ID NO: 12571 - RNA, 20 nt, synthetic construct
  source 1..20: mol_type = other RNA
accttatagttaacacacag

SEQ ID NO: 12572 - RNA, 20 nt, synthetic construct
  source 1..20: mol_type = other RNA
ccttggaaagacggaggcag

SEQ ID NO: 12573 - RNA, 20 nt, synthetic construct
  source 1..20: mol_type = other RNA
ttccaaggcgacatttgtgg

SEQ ID NO: 12574 - RNA, 20 nt, synthetic construct
  source 1..20: mol_type = other RNA
aggagatacacctccaccag

SEQ ID NO: 12575 - RNA, 20 nt, synthetic construct
  source 1..20: mol_type = other RNA
ctctgtatgctggtgtctag

SEQ ID NO: 12576 - RNA, 20 nt, synthetic construct
  source 1..20: mol_type = other RNA
tggtcaccgacttcgagaat

SEQ ID NO: 12577 - RNA, 20 nt, synthetic construct
  source 1..20: mol_type = other RNA
ccgacttcgagaatgtgccc

SEQ ID NO: 12578 - RNA, 20 nt, synthetic construct
  source 1..20: mol_type = other RNA
gtgaccatgaccctgccctc

SEQ ID NO: 12579 - RNA, 20 nt, synthetic construct
  source 1..20: mol_type = other RNA
tcctcgggcacattctcgaa

SEQ ID NO: 12580 - RNA, 20 nt, synthetic construct
  source 1..20: mol_type = other RNA
cgtcctcctcgggcacattc

SEQ ID NO: 12581 - RNA, 20 nt, synthetic construct
  source 1..20: mol_type = other RNA
gtggaagcgggtcccgtcct

SEQ ID NO: 12582 - RNA, 20 nt, synthetic construct
  source 1..20: mol_type = other RNA
gatgggagggctgcctctgc

SEQ ID NO: 12583 - RNA, 20 nt, synthetic construct
  source 1..20: mol_type = other RNA
ccacccacctccaggatggg

SEQ ID NO: 12584 - RNA, 20 nt, synthetic construct
  source 1..20: mol_type = other RNA
ctgtcccctccctgccatca

SEQ ID NO: 12585 - RNA, 20 nt, synthetic construct
  source 1..20: mol_type = other RNA
cctccctgccatcagttgtg

SEQ ID NO: 12586 - RNA, 20 nt, synthetic construct
  source 1..20: mol_type = other RNA
ttctcatgtggtccttgtgt

SEQ ID NO: 12587 - RNA, 20 nt, synthetic construct
  source 1..20: mol_type = other RNA
ttgtgttcgtcgagcaggcc

SEQ ID NO: 12588 - RNA, 20 nt, synthetic construct
  source 1..20: mol_type = other RNA
agcaggccagcaagtgtgac

SEQ ID NO: 12589 - RNA, 20 nt, synthetic construct
  source 1..20: mol_type = other RNA
cacttgctggcctgctcgac

SEQ ID NO: 12590 - RNA, 20 nt, synthetic construct
  source 1..20: mol_type = other RNA
tggcacccacctggcagggg

SEQ ID NO: 12591 - RNA, 20 nt, synthetic construct
  source 1..20: mol_type = other RNA
gcggccgggatgccggcgtg

SEQ ID NO: 12592 - RNA, 20 nt, synthetic construct
  source 1..20: mol_type = other RNA
ggggccatcacttacctatg

SEQ ID NO: 12593 - RNA, 20 nt, synthetic construct
  source 1..20: mol_type = other RNA
ctctccatctggacctggcc

SEQ ID NO: 12594 - RNA, 20 nt, synthetic construct
  source 1..20: mol_type = other RNA
agatggagagagaccagcgt

SEQ ID NO: 12595 - RNA, 20 nt, synthetic construct
  source 1..20: mol_type = other RNA
cctaaccaagaatgctgtgg

SEQ ID NO: 12596 - RNA, 20 nt, synthetic construct
  source 1..20: mol_type = other RNA
tgcaggtagcccagggagtt

SEQ ID NO: 12597 - RNA, 20 nt, synthetic construct
  source 1..20: mol_type = other RNA
aggctgaactccctgggcta

SEQ ID NO: 12598 - RNA, 20 nt, synthetic construct
  source 1..20: mol_type = other RNA
atgacctttccacagttcca

SEQ ID NO: 12599 - RNA, 20 nt, synthetic construct
  source 1..20: mol_type = other RNA
ttgacccagggtcaaggctg

SEQ ID NO: 12600 - RNA, 20 nt, synthetic construct
  source 1..20: mol_type = other RNA
ttatgtcttttgttatgtta

SEQ ID NO: 12601 - RNA, 20 nt, synthetic construct
  source 1..20: mol_type = other RNA
tttgttatgttatcttcaat

SEQ ID NO: 12602 - RNA, 20 nt, synthetic construct
  source 1..20: mol_type = other RNA
ctccacattgaagataacat

SEQ ID NO: 12603 - RNA, 20 nt, synthetic construct
  source 1..20: mol_type = other RNA
cagaggtatgcaagcagaag

SEQ ID NO: 12604 - RNA, 20 nt, synthetic construct
  source 1..20: mol_type = other RNA
cctggtctcagaggtatgca

SEQ ID NO: 12605 - RNA, 20 nt, synthetic construct
  source 1..20: mol_type = other RNA
tgcaagtgagtgagtcccct

SEQ ID NO: 12606 - RNA, 20 nt, synthetic construct
  source 1..20: mol_type = other RNA
cactggccaggcagatgtgg

SEQ ID NO: 12607 - RNA, 20 nt, synthetic construct
  source 1..20: mol_type = other RNA
tctgccagttcctccaccac

SEQ ID NO: 12608 - RNA, 20 nt, synthetic construct
  source 1..20: mol_type = other RNA
agaaaaagtcctctgccagt

SEQ ID NO: 12609 - RNA, 20 nt, synthetic construct
  source 1..20: mol_type = other RNA
cagtctagaaaaagtcctct

SEQ ID NO: 12610 - RNA, 20 nt, synthetic construct
  source 1..20: mol_type = other RNA
acccagcggcccccctatga

SEQ ID NO: 12611 - RNA, 20 nt, synthetic construct
  source 1..20: mol_type = other RNA
agttgagaactaggactctg

SEQ ID NO: 12612 - RNA, 20 nt, synthetic construct
  source 1..20: mol_type = other RNA
tagttctcaactggacttca

SEQ ID NO: 12613 - RNA, 20 nt, synthetic construct
  source 1..20: mol_type = other RNA
accggcccccagagtcctag

SEQ ID NO: 12614 - RNA, 20 nt, synthetic construct
  source 1..20: mol_type = other RNA
gtaagggagagaaccctccc

SEQ ID NO: 12615 - RNA, 20 nt, synthetic construct
  source 1..20: mol_type = other RNA
ggccacagaaggaagtcagt

SEQ ID NO: 12616 - RNA, 20 nt, synthetic construct
  source 1..20: mol_type = other RNA
tggggctggccttgccgtag

SEQ ID NO: 12617 - RNA, 20 nt, synthetic construct
  source 1..20: mol_type = other RNA
actatttagcagctacggca

SEQ ID NO: 12618 - RNA, 20 nt, synthetic construct
  source 1..20: mol_type = other RNA
agagaggggaggtgactgcc

SEQ ID NO: 12619 - RNA, 20 nt, synthetic construct
  source 1..20: mol_type = other RNA
cctcccctctctggactggt

SEQ ID NO: 12620 - RNA, 20 nt, synthetic construct
  source 1..20: mol_type = other RNA
cacagctcaagctggggaac

SEQ ID NO: 12621 - RNA, 20 nt, synthetic construct
  source 1..20: mol_type = other RNA
gctctgggcagcagcttgac

SEQ ID NO: 12622 - RNA, 20 nt, synthetic construct
  source 1..20: mol_type = other RNA
agctgctgcccagagctgac

SEQ ID NO: 12623 - RNA, 20 nt, synthetic construct
  source 1..20: mol_type = other RNA
aacactggctctggtgctgg

SEQ ID NO: 12624 - RNA, 20 nt, synthetic construct
  source 1..20: mol_type = other RNA
gccctgtgctccaccagttc

SEQ ID NO: 12625 - RNA, 20 nt, synthetic construct
  source 1..20: mol_type = other RNA
cagggcagaactggtggagc

SEQ ID NO: 12626 - RNA, 20 nt, synthetic construct
  source 1..20: mol_type = other RNA
cctgatggggcagaaggtta

SEQ ID NO: 12627 - RNA, 20 nt, synthetic construct
  source 1..20: mol_type = other RNA
cacccctttattgactgacc

SEQ ID NO: 12628 - RNA, 20 nt, synthetic construct
  source 1..20: mol_type = other RNA
ataaaggggtgggacaggca

SEQ ID NO: 12629 - RNA, 20 nt, synthetic construct
  source 1..20: mol_type = other RNA
gtcaataaaggggtgggaca

SEQ ID NO: 12630 - RNA, 20 nt, synthetic construct
  source 1..20: mol_type = other RNA
ggtcagttcctgaaggtcag

SEQ ID NO: 12631 - RNA, 20 nt, synthetic construct
  source 1..20: mol_type = other RNA
gttcctgaaggtcagtgtgt

SEQ ID NO: 12632 - RNA, 20 nt, synthetic construct
  source 1..20: mol_type = other RNA
gtgtgtggaggggaggctgt

SEQ ID NO: 12633 - RNA, 20 nt, synthetic construct
  source 1..20: mol_type = other RNA
tccagaggccagagcaccag

SEQ ID NO: 12634 - RNA, 20 nt, synthetic construct
  source 1..20: mol_type = other RNA
cttctttggggtcccagtca

SEQ ID NO: 12635 - RNA, 20 nt, synthetic construct
  source 1..20: mol_type = other RNA
cagtcagtgtatgggaagcc

SEQ ID NO: 12636 - RNA, 20 nt, synthetic construct
  source 1..20: mol_type = other RNA
gtgtatgggaagcccttatt

SEQ ID NO: 12637 - RNA, 20 nt, synthetic construct
  source 1..20: mol_type = other RNA
tgcaataagggcttcccata

SEQ ID NO: 12638 - RNA, 20 nt, synthetic construct
  source 1..20: mol_type = other RNA
ctattgccttccttgccact

SEQ ID NO: 12639 - RNA, 20 nt, synthetic construct
  source 1..20: mol_type = other RNA
agtctgagcacagagataag

SEQ ID NO: 12640 - RNA, 20 nt, synthetic construct
  source 1..20: mol_type = other RNA
gagcacagagataagcacac

SEQ ID NO: 12641 - RNA, 20 nt, synthetic construct
  source 1..20: mol_type = other RNA
ggagttcgagaccagcctgt

SEQ ID NO: 12642 - RNA, 20 nt, synthetic construct
  source 1..20: mol_type = other RNA
cgaactcctgacctcaggtg

SEQ ID NO: 12643 - RNA, 20 nt, synthetic construct
  source 1..20: mol_type = other RNA
ctactaaaaatacaaaaatt

SEQ ID NO: 12644 - RNA, 20 nt, synthetic construct
  source 1..20: mol_type = other RNA
gtatcccagctacttgggag

SEQ ID NO: 12645 - RNA, 20 nt, synthetic construct
  source 1..20: mol_type = other RNA
cctaggaggagcatggctgt

SEQ ID NO: 12646 - RNA, 20 nt, synthetic construct
  source 1..20: mol_type = other RNA
ccaggagccgtggccaagga

SEQ ID NO: 12647 - RNA, 20 nt, synthetic construct
  source 1..20: mol_type = other RNA
aatgaggtgtgggagccttc

SEQ ID NO: 12648 - RNA, 20 nt, synthetic construct
  source 1..20: mol_type = other RNA
gttccaggtccccttgcaca

SEQ ID NO: 12649 - RNA, 20 nt, synthetic construct
  source 1..20: mol_type = other RNA
ccttgcacatcagggccaga

SEQ ID NO: 12650 - RNA, 20 nt, synthetic construct
  source 1..20: mol_type = other RNA
ccaggccactgggccagagc

SEQ ID NO: 12651 - RNA, 20 nt, synthetic construct
  source 1..20: mol_type = other RNA
ggacatcgagaccatccttg

SEQ ID NO: 12652 - RNA, 20 nt, synthetic construct
  source 1..20: mol_type = other RNA
tgacctcatgatcctcccgc

SEQ ID NO: 12653 - RNA, 20 nt, synthetic construct
  source 1..20: mol_type = other RNA
cgatgtcctgacctcatgat

SEQ ID NO: 12654 - RNA, 20 nt, synthetic construct
  source 1..20: mol_type = other RNA
ctactaaaactacaaaaaat

SEQ ID NO: 12655 - RNA, 20 nt, synthetic construct
  source 1..20: mol_type = other RNA
cagctactcaggaggctgag

SEQ ID NO: 12656 - RNA, 20 nt, synthetic construct
  source 1..20: mol_type = other RNA
cgctctattgcccaggctgg

SEQ ID NO: 12657 - RNA, 20 nt, synthetic construct
  source 1..20: mol_type = other RNA
ggaaagaaaaaaaaaaaaaa

SEQ ID NO: 12658 - RNA, 20 nt, synthetic construct
  source 1..20: mol_type = other RNA
acagtaacagctcttttttt

SEQ ID NO: 12659 - RNA, 20 nt, synthetic construct
  source 1..20: mol_type = other RNA
acctcatgctactgtcaaca

SEQ ID NO: 12660 - RNA, 20 nt, synthetic construct
  source 1..20: mol_type = other RNA
taggcatggagtcttttaat

SEQ ID NO: 12661 - RNA, 20 nt, synthetic construct
  source 1..20: mol_type = other RNA
tttaattctttagacaatcc

SEQ ID NO: 12662 - RNA, 20 nt, synthetic construct
  source 1..20: mol_type = other RNA
aaagaattaaaagactccat

SEQ ID NO: 12663 - RNA, 20 nt, synthetic construct
  source 1..20: mol_type = other RNA
ctgtttcacagagggcgggg

SEQ ID NO: 12664 - RNA, 20 nt, synthetic construct
  source 1..20: mol_type = other RNA
tggctgcccactcaccagct

SEQ ID NO: 12665 - RNA, 20 nt, synthetic construct
  source 1..20: mol_type = other RNA
aacacttgcggccacggtgg

SEQ ID NO: 12666 - RNA, 20 nt, synthetic construct
  source 1..20: mol_type = other RNA
gaatatacgaactcagggga

SEQ ID NO: 12667 - RNA, 20 nt, synthetic construct
  source 1..20: mol_type = other RNA
aagcgtctgaatatacgaac

SEQ ID NO: 12668 - RNA, 20 nt, synthetic construct
  source 1..20: mol_type = other RNA
aggttctgcagagaagcaga

SEQ ID NO: 12669 - RNA, 20 nt, synthetic construct
  source 1..20: mol_type = other RNA
catgagcttgaaactcttaa

SEQ ID NO: 12670 - RNA, 20 nt, synthetic construct
  source 1..20: mol_type = other RNA
gaaatccgcagggcaggcca

SEQ ID NO: 12671 - RNA, 20 nt, synthetic construct
  source 1..20: mol_type = other RNA
taaggcagtcctggggcaga

SEQ ID NO: 12672 - RNA, 20 nt, synthetic construct
  source 1..20: mol_type = other RNA
tggggcagaattccttcttc

SEQ ID NO: 12673 - RNA, 20 nt, synthetic construct
  source 1..20: mol_type = other RNA
gttctcttaaggccttcaac

SEQ ID NO: 12674 - RNA, 20 nt, synthetic construct
  source 1..20: mol_type = other RNA
tctgatttaaatgttagtca

SEQ ID NO: 12675 - RNA, 20 nt, synthetic construct
  source 1..20: mol_type = other RNA
catctaaaaaatattttcgc

SEQ ID NO: 12676 - RNA, 20 nt, synthetic construct
  source 1..20: mol_type = other RNA
aaagccagtggaaatgctgc

SEQ ID NO: 12677 - RNA, 20 nt, synthetic construct
  source 1..20: mol_type = other RNA
ccccaaggggtgaccttggc

SEQ ID NO: 12678 - RNA, 20 nt, synthetic construct
  source 1..20: mol_type = other RNA
ccccttggggagacctgctc

SEQ ID NO: 12679 - RNA, 20 nt, synthetic construct
  source 1..20: mol_type = other RNA
agcctgtggggccactggtg

SEQ ID NO: 12680 - RNA, 20 nt, synthetic construct
  source 1..20: mol_type = other RNA
tcaacgccgcctgccagcgc

SEQ ID NO: 12681 - RNA, 20 nt, synthetic construct
  source 1..20: mol_type = other RNA
tgctggtcaccgctgccggc

SEQ ID NO: 12682 - RNA, 20 nt, synthetic construct
  source 1..20: mol_type = other RNA
ccgctgccggcaacttccgg

SEQ ID NO: 12683 - RNA, 20 nt, synthetic construct
  source 1..20: mol_type = other RNA
cggaagttgccggcagcggt

SEQ ID NO: 12684 - RNA, 20 nt, synthetic construct
  source 1..20: mol_type = other RNA
tcagagacccccgccatgcg

SEQ ID NO: 12685 - RNA, 20 nt, synthetic construct
  source 1..20: mol_type = other RNA
gagacccccgccatgcggga

SEQ ID NO: 12686 - RNA, 20 nt, synthetic construct
  source 1..20: mol_type = other RNA
ctgacgactccttccaaagc

SEQ ID NO: 12687 - RNA, 20 nt, synthetic construct
  source 1..20: mol_type = other RNA
gaatagcagtggccccgcca

SEQ ID NO: 12688 - RNA, 20 nt, synthetic construct
  source 1..20: mol_type = other RNA
tggccactctccctcctgaa

SEQ ID NO: 12689 - RNA, 20 nt, synthetic construct
  source 1..20: mol_type = other RNA
tctggtacccgccccctccc

SEQ ID NO: 12690 - RNA, 20 nt, synthetic construct
  source 1..20: mol_type = other RNA
tctgcccaatactctttggg

SEQ ID NO: 12691 - RNA, 20 nt, synthetic construct
  source 1..20: mol_type = other RNA
agctctctccgcggctccat

SEQ ID NO: 12692 - RNA, 20 nt, synthetic construct
  source 1..20: mol_type = other RNA
tggagccgcggagagagctg

SEQ ID NO: 12693 - RNA, 20 nt, synthetic construct
  source 1..20: mol_type = other RNA
gtcatggagccgcggagaga

SEQ ID NO: 12694 - RNA, 20 nt, synthetic construct
  source 1..20: mol_type = other RNA
gagccctcaaccgctcccat

SEQ ID NO: 12695 - RNA, 20 nt, synthetic construct
  source 1..20: mol_type = other RNA
ccgcagccacactgcaccgg

SEQ ID NO: 12696 - RNA, 20 nt, synthetic construct
  source 1..20: mol_type = other RNA
gtgtccccgcagccacactg

SEQ ID NO: 12697 - RNA, 20 nt, synthetic construct
  source 1..20: mol_type = other RNA
ctgccccccagctcctcagg

SEQ ID NO: 12698 - RNA, 20 nt, synthetic construct
  source 1..20: mol_type = other RNA
ctcctctgacccaccactcc

SEQ ID NO: 12699 - RNA, 20 nt, synthetic construct
  source 1..20: mol_type = other RNA
gaggagggacggtcactgcc

SEQ ID NO: 12700 - RNA, 20 nt, synthetic construct
  source 1..20: mol_type = other RNA
ggacactgcgggtatctagg

SEQ ID NO: 12701 - RNA, 20 nt, synthetic construct
  source 1..20: mol_type = other RNA
tgacactggaggagtggtgg

SEQ ID NO: 12702 - RNA, 20 nt, synthetic construct
  source 1..20: mol_type = other RNA
ggaacttcaagtctgtgtgt

SEQ ID NO: 12703 - RNA, 20 nt, synthetic construct
  source 1..20: mol_type = other RNA
gtgtgtgtgcgtgcgcgcgc

SEQ ID NO: 12704 - RNA, 20 nt, synthetic construct
  source 1..20: mol_type = other RNA
ggtacgcatctgctctgcaa

SEQ ID NO: 12705 - RNA, 20 nt, synthetic construct
  source 1..20: mol_type = other RNA
cccctggcctatcaaggctt

SEQ ID NO: 12706 - RNA, 20 nt, synthetic construct
  source 1..20: mol_type = other RNA
tctcagtttccccccgtggc

SEQ ID NO: 12707 - RNA, 20 nt, synthetic construct
  source 1..20: mol_type = other RNA
ctaccatagccaggcagcat

SEQ ID NO: 12708 - RNA, 20 nt, synthetic construct
  source 1..20: mol_type = other RNA
gattttccttaggaggggac

SEQ ID NO: 12709 - RNA, 20 nt, synthetic construct
  source 1..20: mol_type = other RNA
cctcctaaggaaaatctgac

SEQ ID NO: 12710 - RNA, 20 nt, synthetic construct
  source 1..20: mol_type = other RNA
cactcaaatgtcccctccta

SEQ ID NO: 12711 - RNA, 20 nt, synthetic construct
  source 1..20: mol_type = other RNA
agcccagctggcaaggcctg

SEQ ID NO: 12712 - RNA, 20 nt, synthetic construct
  source 1..20: mol_type = other RNA
gcctctgcaacccctctctt

SEQ ID NO: 12713 - RNA, 20 nt, synthetic construct
  source 1..20: mol_type = other RNA
tcacagttggggccaccaat

SEQ ID NO: 12714 - RNA, 20 nt, synthetic construct
  source 1..20: mol_type = other RNA
tgggcattggtggccccaac

SEQ ID NO: 12715 - RNA, 20 nt, synthetic construct
  source 1..20: mol_type = other RNA
ccggctggtcttgggcattg

SEQ ID NO: 12716 - RNA, 20 nt, synthetic construct
  source 1..20: mol_type = other RNA
ccagggtcaccggctggtct

SEQ ID NO: 12717 - RNA, 20 nt, synthetic construct
  source 1..20: mol_type = other RNA
ccaaagtccccagggtcacc

SEQ ID NO: 12718 - RNA, 20 nt, synthetic construct
  source 1..20: mol_type = other RNA
acacagcggccaaagttggt

SEQ ID NO: 12719 - RNA, 20 nt, synthetic construct
  source 1..20: mol_type = other RNA
tcccctggggcaaagaggtc

SEQ ID NO: 12720 - RNA, 20 nt, synthetic construct
  source 1..20: mol_type = other RNA
ctggaggcaccaatgatgtc

SEQ ID NO: 12721 - RNA, 20 nt, synthetic construct
  source 1..20: mol_type = other RNA
cagagtgggacatcacaggc

SEQ ID NO: 12722 - RNA, 20 nt, synthetic construct
  source 1..20: mol_type = other RNA
cactctgtgacacaaagcag

SEQ ID NO: 12723 - RNA, 20 nt, synthetic construct
  source 1..20: mol_type = other RNA
ccaccccactgcctcggcca

SEQ ID NO: 12724 - RNA, 20 nt, synthetic construct
  source 1..20: mol_type = other RNA
gggtctgtgccgggacctcc

SEQ ID NO: 12725 - RNA, 20 nt, synthetic construct
  source 1..20: mol_type = other RNA
gtgccgggacctccagtgcc

SEQ ID NO: 12726 - RNA, 20 nt, synthetic construct
  source 1..20: mol_type = other RNA
cggcacagaccctgactgcc

SEQ ID NO: 12727 - RNA, 20 nt, synthetic construct
  source 1..20: mol_type = other RNA
ccctgcacagagcctggcac

SEQ ID NO: 12728 - RNA, 20 nt, synthetic construct
  source 1..20: mol_type = other RNA
ttgaaggcaccatcaggcct

SEQ ID NO: 12729 - RNA, 20 nt, synthetic construct
  source 1..20: mol_type = other RNA
gatgagggaggcgagtgcac

SEQ ID NO: 12730 - RNA, 20 nt, synthetic construct
  source 1..20: mol_type = other RNA
gggctgtattagagggagcc

SEQ ID NO: 12731 - RNA, 20 nt, synthetic construct
  source 1..20: mol_type = other RNA
gagaaggcatcttggaggag

SEQ ID NO: 12732 - RNA, 20 nt, synthetic construct
  source 1..20: mol_type = other RNA
ctcctccaagatgccttctc

SEQ ID NO: 12733 - RNA, 20 nt, synthetic construct
  source 1..20: mol_type = other RNA
tatcggccaggtgaactcct

SEQ ID NO: 12734 - RNA, 20 nt, synthetic construct
  source 1..20: mol_type = other RNA
tacctcactgagtaaggact

SEQ ID NO: 12735 - RNA, 20 nt, synthetic construct
  source 1..20: mol_type = other RNA
ttactcagtgaggtaagaca

SEQ ID NO: 12736 - RNA, 20 nt, synthetic construct
  source 1..20: mol_type = other RNA
gtgtgcacgtgtgtttgtgt

SEQ ID NO: 12737 - RNA, 20 nt, synthetic construct
  source 1..20: mol_type = other RNA
cctgctggggcaggagggcc

SEQ ID NO: 12738 - RNA, 20 nt, synthetic construct
  source 1..20: mol_type = other RNA
gccgagccggagctcaccct

SEQ ID NO: 12739 - RNA, 20 nt, synthetic construct
  source 1..20: mol_type = other RNA
ctgcctcaactcggccaggg

SEQ ID NO: 12740 - RNA, 20 nt, synthetic construct
  source 1..20: mol_type = other RNA
tcaatgaggcctggttccct

SEQ ID NO: 12741 - RNA, 20 nt, synthetic construct
  source 1..20: mol_type = other RNA
tcagggaaccaggcctcatt

SEQ ID NO: 12742 - RNA, 20 nt, synthetic construct
  source 1..20: mol_type = other RNA
gtacccgctggtcctcaggg

SEQ ID NO: 12743 - RNA, 20 nt, synthetic construct
  source 1..20: mol_type = other RNA
aggctggggcttgggaggtc

SEQ ID NO: 12744 - RNA, 20 nt, synthetic construct
  source 1..20: mol_type = other RNA
gtgtgaccttgacagtctct

SEQ ID NO: 12745 - RNA, 20 nt, synthetic construct
  source 1..20: mol_type = other RNA
cacagacctcccaagcccca

SEQ ID NO: 12746 - RNA, 20 nt, synthetic construct
  source 1..20: mol_type = other RNA
aggtcacacagacctcccaa

SEQ ID NO: 12747 - RNA, 20 nt, synthetic construct
  source 1..20: mol_type = other RNA
ctcccttctcccttgtctgt

SEQ ID NO: 12748 - RNA, 20 nt, synthetic construct
  source 1..20: mol_type = other RNA
gtgtaaggaggatgacgcca

SEQ ID NO: 12749 - RNA, 20 nt, synthetic construct
  source 1..20: mol_type = other RNA
tcctccttacacagacaagg

SEQ ID NO: 12750 - RNA, 20 nt, synthetic construct
  source 1..20: mol_type = other RNA
ctataaaaacacgttatgaa

SEQ ID NO: 12751 - RNA, 20 nt, synthetic construct
  source 1..20: mol_type = other RNA
cctcactcccagcaccccct

SEQ ID NO: 12752 - RNA, 20 nt, synthetic construct
  source 1..20: mol_type = other RNA
tgcaaaacagctgccaacct

SEQ ID NO: 12753 - RNA, 20 nt, synthetic construct
  source 1..20: mol_type = other RNA
gcacactcggggcctacacg

SEQ ID NO: 12754 - RNA, 20 nt, synthetic construct
  source 1..20: mol_type = other RNA
cccgctgcgccccagatgag

SEQ ID NO: 12755 - RNA, 20 nt, synthetic construct
  source 1..20: mol_type = other RNA
cctccatgcgctcgccccgc

SEQ ID NO: 12756 - RNA, 20 nt, synthetic construct
  source 1..20: mol_type = other RNA
gtgctgggccctcagggacc

SEQ ID NO: 12757 - RNA, 20 nt, synthetic construct
  source 1..20: mol_type = other RNA
ctgagggcccagcactgaca

SEQ ID NO: 12758 - RNA, 20 nt, synthetic construct
  source 1..20: mol_type = other RNA
ggaggatggaggggcttgct

SEQ ID NO: 12759 - RNA, 20 nt, synthetic construct
  source 1..20: mol_type = other RNA
ggccagccctgtaagcttac

SEQ ID NO: 12760 - RNA, 20 nt, synthetic construct
  source 1..20: mol_type = other RNA
tgcagcctctaggaaaccct

SEQ ID NO: 12761 - RNA, 20 nt, synthetic construct
  source 1..20: mol_type = other RNA
gcgatctgctactctggact

SEQ ID NO: 12762 - RNA, 20 nt, synthetic construct
  source 1..20: mol_type = other RNA
agagtagcagatcgctgacc

SEQ ID NO: 12763 - RNA, 20 nt, synthetic construct
  source 1..20: mol_type = other RNA
taatgctcgtgtgagaggca

SEQ ID NO: 12764 - RNA, 20 nt, synthetic construct
  source 1..20: mol_type = other RNA
tccttgggcaggagtgagct

SEQ ID NO: 12765 - RNA, 20 nt, synthetic construct
  source 1..20: mol_type = other RNA
ccagaaggctgggtctggct

SEQ ID NO: 12766 - RNA, 20 nt, synthetic construct
  source 1..20: mol_type = other RNA
ggctggcccctggcagggac

SEQ ID NO: 12767 - RNA, 20 nt, synthetic construct
  source 1..20: mol_type = other RNA
ctgccaggggccagccagac

SEQ ID NO: 12768 - RNA, 20 nt, synthetic construct
  source 1..20: mol_type = other RNA
agtccctttctgtgttttca

SEQ ID NO: 12769 - RNA, 20 nt, synthetic construct
  source 1..20: mol_type = other RNA
ctttctgtgttttcaaagcc

SEQ ID NO: 12770 - RNA, 20 nt, synthetic construct
  source 1..20: mol_type = other RNA
ttgactctaaggcccaaggg

SEQ ID NO: 12771 - RNA, 20 nt, synthetic construct
  source 1..20: mol_type = other RNA
aagacggaaatgggaatctg

SEQ ID NO: 12772 - RNA, 20 nt, synthetic construct
  source 1..20: mol_type = other RNA
gccgggcccacaacgctttt

SEQ ID NO: 12773 - RNA, 20 nt, synthetic construct
  source 1..20: mol_type = other RNA
acgccattgccaggtgctgc

SEQ ID NO: 12774 - RNA, 20 nt, synthetic construct
  source 1..20: mol_type = other RNA
acacagctccaccagctgag

SEQ ID NO: 12775 - RNA, 20 nt, synthetic construct
  source 1..20: mol_type = other RNA
ccatgctggcctcagctggt

SEQ ID NO: 12776 - RNA, 20 nt, synthetic construct
  source 1..20: mol_type = other RNA
actgccaccaacagggccac

SEQ ID NO: 12777 - RNA, 20 nt, synthetic construct
  source 1..20: mol_type = other RNA
tcacaggtaggaggctgggc

SEQ ID NO: 12778 - RNA, 20 nt, synthetic construct
  source 1..20: mol_type = other RNA
ctttctccttatgcacccac

SEQ ID NO: 12779 - RNA, 20 nt, synthetic construct
  source 1..20: mol_type = other RNA
tcacaagtgtgatccatgag

SEQ ID NO: 12780 - RNA, 20 nt, synthetic construct
  source 1..20: mol_type = other RNA
catggatcacacttgtgagg

SEQ ID NO: 12781 - RNA, 20 nt, synthetic construct
  source 1..20: mol_type = other RNA
ggcttgagtctcatggatca

SEQ ID NO: 12782 - RNA, 20 nt, synthetic construct
  source 1..20: mol_type = other RNA
cctgcccaggctcaaagggc

SEQ ID NO: 12783 - RNA, 20 nt, synthetic construct
  source 1..20: mol_type = other RNA
aggagaggcagctccagaga

SEQ ID NO: 12784 - RNA, 20 nt, synthetic construct
  source 1..20: mol_type = other RNA
gccctcctttcagccccagc

SEQ ID NO: 12785 - RNA, 20 nt, synthetic construct
  source 1..20: mol_type = other RNA
cacagctatagagcggcagg

SEQ ID NO: 12786 - RNA, 20 nt, synthetic construct
  source 1..20: mol_type = other RNA
cggcactaagctaagtgctt

SEQ ID NO: 12787 - RNA, 20 nt, synthetic construct
  source 1..20: mol_type = other RNA
atagttgcctataccagagg

SEQ ID NO: 12788 - RNA, 20 nt, synthetic construct
  source 1..20: mol_type = other RNA
aaaacatgcccaggcaggta

SEQ ID NO: 12789 - RNA, 20 nt, synthetic construct
  source 1..20: mol_type = other RNA
cagatggggacctcttgggg

SEQ ID NO: 12790 - RNA, 20 nt, synthetic construct
  source 1..20: mol_type = other RNA
ccatctgtgacttcctgcta

SEQ ID NO: 12791 - RNA, 20 nt, synthetic construct
  source 1..20: mol_type = other RNA
gggaagacagtgggactcca

SEQ ID NO: 12792 - RNA, 20 nt, synthetic construct
  source 1..20: mol_type = other RNA
tcccagacctctcatgctcc

SEQ ID NO: 12793 - RNA, 20 nt, synthetic construct
  source 1..20: mol_type = other RNA
cactgtcttcccagacctct

SEQ ID NO: 12794 - RNA, 20 nt, synthetic construct
  source 1..20: mol_type = other RNA
gagcacgtccaggggaacca

SEQ ID NO: 12795 - RNA, 20 nt, synthetic construct
  source 1..20: mol_type = other RNA
aggggaaccactgagggttt

SEQ ID NO: 12796 - RNA, 20 nt, synthetic construct
  source 1..20: mol_type = other RNA
ggtggctggtgcccttgtcc

SEQ ID NO: 12797 - RNA, 20 nt, synthetic construct
  source 1..20: mol_type = other RNA
aggggagaggctccgtcagg

SEQ ID NO: 12798 - RNA, 20 nt, synthetic construct
  source 1..20: mol_type = other RNA
ggttcaggggtcctggcttg

SEQ ID NO: 12799 - RNA, 20 nt, synthetic construct
  source 1..20: mol_type = other RNA
tggcttggagggaagtccgc

SEQ ID NO: 12800 - RNA, 20 nt, synthetic construct
  source 1..20: mol_type = other RNA
gccatgctctaatcacgctc

SEQ ID NO: 12801 - RNA, 20 nt, synthetic construct
  source 1..20: mol_type = other RNA
gtttgaagtcatggaatctg

SEQ ID NO: 12802 - RNA, 20 nt, synthetic construct
  source 1..20: mol_type = other RNA
tggaatctgactccatgaag

SEQ ID NO: 12803 - RNA, 20 nt, synthetic construct
  source 1..20: mol_type = other RNA
gattccatgacttcaaactg

SEQ ID NO: 12804 - RNA, 20 nt, synthetic construct
  source 1..20: mol_type = other RNA
agcctgcagttcccttagct

SEQ ID NO: 12805 - RNA, 20 nt, synthetic construct
  source 1..20: mol_type = other RNA
tagctgcaagggctcggggc

SEQ ID NO: 12806 - RNA, 20 nt, synthetic construct
  source 1..20: mol_type = other RNA
tcttcacagtgtccctgtga

SEQ ID NO: 12807 - RNA, 20 nt, synthetic construct
  source 1..20: mol_type = other RNA
ctgtgagtaggtgtggtttc

SEQ ID NO: 12808 - RNA, 20 nt, synthetic construct
  source 1..20: mol_type = other RNA
gactcctaagcccatggagg

SEQ ID NO: 12809 - RNA, 20 nt, synthetic construct
  source 1..20: mol_type = other RNA
gacacacccattggctaaga

SEQ ID NO: 12810 - RNA, 20 nt, synthetic construct
  source 1..20: mol_type = other RNA
gaaccacctcagaatgccct

SEQ ID NO: 12811 - RNA, 20 nt, synthetic construct
  source 1..20: mol_type = other RNA
gtctgaaccacctcagaatg

SEQ ID NO: 12812 - RNA, 20 nt, synthetic construct
  source 1..20: mol_type = other RNA
ccatctctgggtggaaagat

SEQ ID NO: 12813 - RNA, 20 nt, synthetic construct
  source 1..20: mol_type = other RNA
cacagctggtcagctgcaga

SEQ ID NO: 12814 - RNA, 20 nt, synthetic construct
  source 1..20: mol_type = other RNA
gctgcagagttgagaacaca

SEQ ID NO: 12815 - RNA, 20 nt, synthetic construct
  source 1..20: mol_type = other RNA
tggtgctcaggccagcatct

SEQ ID NO: 12816 - RNA, 20 nt, synthetic construct
  source 1..20: mol_type = other RNA
gaggcaagagctaggaaacc

SEQ ID NO: 12817 - RNA, 20 nt, synthetic construct
  source 1..20: mol_type = other RNA
gatggggatgggcactggag

SEQ ID NO: 12818 - RNA, 20 nt, synthetic construct
  source 1..20: mol_type = other RNA
ccagtgcccatccccatcag

SEQ ID NO: 12819 - RNA, 20 nt, synthetic construct
  source 1..20: mol_type = other RNA
tccacctcccagtgggagct

SEQ ID NO: 12820 - RNA, 20 nt, synthetic construct
  source 1..20: mol_type = other RNA
gcccaaccagtgcgtgggcc

SEQ ID NO: 12821 - RNA, 20 nt, synthetic construct
  source 1..20: mol_type = other RNA
ggaatgcaaagtcaaggagc

SEQ ID NO: 12822 - RNA, 20 nt, synthetic construct
  source 1..20: mol_type = other RNA
aggagcatggaatcccggcc

SEQ ID NO: 12823 - RNA, 20 nt, synthetic construct
  source 1..20: mol_type = other RNA
ctcctgcacagcttttctgt

SEQ ID NO: 12824 - RNA, 20 nt, synthetic construct
  source 1..20: mol_type = other RNA
gtttgtgccaccaccatacc

SEQ ID NO: 12825 - RNA, 20 nt, synthetic construct
  source 1..20: mol_type = other RNA
acacaatggcggaagctgcc

SEQ ID NO: 12826 - RNA, 20 nt, synthetic construct
  source 1..20: mol_type = other RNA
ctgtgtggctgggtctgttt

SEQ ID NO: 12827 - RNA, 20 nt, synthetic construct
  source 1..20: mol_type = other RNA
gtttttgcttttgtccagat

SEQ ID NO: 12828 - RNA, 20 nt, synthetic construct
  source 1..20: mol_type = other RNA
agatcagtaaggtttgctac

SEQ ID NO: 12829 - RNA, 20 nt, synthetic construct
  source 1..20: mol_type = other RNA
tgctgtgttgcccaggctgg

SEQ ID NO: 12830 - RNA, 20 nt, synthetic construct
  source 1..20: mol_type = other RNA
caaattcctgggctcaagca

SEQ ID NO: 12831 - RNA, 20 nt, synthetic construct
  source 1..20: mol_type = other RNA
cagcctccccaagtgttggg

SEQ ID NO: 12832 - RNA, 20 nt, synthetic construct
  source 1..20: mol_type = other RNA
cagggtcaggagcagcactg

SEQ ID NO: 12833 - RNA, 20 nt, synthetic construct
  source 1..20: mol_type = other RNA
ggagcagcactgggctctga

SEQ ID NO: 12834 - RNA, 20 nt, synthetic construct
  source 1..20: mol_type = other RNA
tcagagcccagtgctgctcc

SEQ ID NO: 12835 - RNA, 20 nt, synthetic construct
  source 1..20: mol_type = other RNA
cggctgagtgagctctgtgt

SEQ ID NO: 12836 - RNA, 20 nt, synthetic construct
  source 1..20: mol_type = other RNA
tgctaacaaccttcagcatg

SEQ ID NO: 12837 - RNA, 20 nt, synthetic construct
  source 1..20: mol_type = other RNA
cattccagggcttggcacat

SEQ ID NO: 12838 - RNA, 20 nt, synthetic construct
  source 1..20: mol_type = other RNA
actcttaaatgaactcagag

SEQ ID NO: 12839 - RNA, 20 nt, synthetic construct
  source 1..20: mol_type = other RNA
gttttaaaatgcaagtctgt

SEQ ID NO: 12840 - RNA, 20 nt, synthetic construct
  source 1..20: mol_type = other RNA
gtgttgattctggtctggat

SEQ ID NO: 12841 - RNA, 20 nt, synthetic construct
  source 1..20: mol_type = other RNA
ggatggtgcattcctcgaga

SEQ ID NO: 12842 - RNA, 20 nt, synthetic construct
  source 1..20: mol_type = other RNA
tttgctctcgaggaatgcac

SEQ ID NO: 12843 - RNA, 20 nt, synthetic construct
  source 1..20: mol_type = other RNA
tggtcttggatccacttgcc

SEQ ID NO: 12844 - RNA, 20 nt, synthetic construct
  source 1..20: mol_type = other RNA
tggatccacttgccctgggt

SEQ ID NO: 12845 - RNA, 20 nt, synthetic construct
  source 1..20: mol_type = other RNA
cttgggcctgtatccctccc

SEQ ID NO: 12846 - RNA, 20 nt, synthetic construct
  source 1..20: mol_type = other RNA
tcctccactaaaatagatgc

SEQ ID NO: 12847 - RNA, 20 nt, synthetic construct
  source 1..20: mol_type = other RNA
ggagaggtctcgctgacaag

SEQ ID NO: 12848 - RNA, 20 nt, synthetic construct
  source 1..20: mol_type = other RNA
cgctgacaaggtggacgaaa

SEQ ID NO: 12849 - RNA, 20 nt, synthetic construct
  source 1..20: mol_type = other RNA
gcgagacctctcctgacctc

SEQ ID NO: 12850 - RNA, 20 nt, synthetic construct
  source 1..20: mol_type = other RNA
accttgtcagcgagacctct

SEQ ID NO: 12851 - RNA, 20 nt, synthetic construct
  source 1..20: mol_type = other RNA
cctctgaggcaccccccatc

SEQ ID NO: 12852 - RNA, 20 nt, synthetic construct
  source 1..20: mol_type = other RNA
ggtgagacctgagggtcaca

SEQ ID NO: 12853 - RNA, 20 nt, synthetic construct
  source 1..20: mol_type = other RNA
cacctgacttggccctgtcc

SEQ ID NO: 12854 - RNA, 20 nt, synthetic construct
  source 1..20: mol_type = other RNA
cagtcagcagtgagctgggg

SEQ ID NO: 12855 - RNA, 20 nt, synthetic construct
  source 1..20: mol_type = other RNA
gcagtgagctggggccatgc

SEQ ID NO: 12856 - RNA, 20 nt, synthetic construct
  source 1..20: mol_type = other RNA
ggcctcagaggagtgtggtc

SEQ ID NO: 12857 - RNA, 20 nt, synthetic construct
  source 1..20: mol_type = other RNA
ggcctggatctgaacctctc

SEQ ID NO: 12858 - RNA, 20 nt, synthetic construct
  source 1..20: mol_type = other RNA
tctcttctcagctcagcagc

SEQ ID NO: 12859 - RNA, 20 nt, synthetic construct
  source 1..20: mol_type = other RNA
ttgtcatctcttctcagctc

SEQ ID NO: 12860 - RNA, 20 nt, synthetic construct
  source 1..20: mol_type = other RNA
ccctgcttctgcccaaggtc

SEQ ID NO: 12861 - RNA, 20 nt, synthetic construct
  source 1..20: mol_type = other RNA
aggcgttggggcggggctca

SEQ ID NO: 12862 - RNA, 20 nt, synthetic construct
  source 1..20: mol_type = other RNA
gaagggagcctgcaggcctg

SEQ ID NO: 12863 - RNA, 20 nt, synthetic construct
  source 1..20: mol_type = other RNA
aggggcccgagccttggtgc

SEQ ID NO: 12864 - RNA, 20 nt, synthetic construct
  source 1..20: mol_type = other RNA
atctccacggccctcaaacc

SEQ ID NO: 12865 - RNA, 20 nt, synthetic construct
  source 1..20: mol_type = other RNA
gccatggtgcagaaccgcct

SEQ ID NO: 12866 - RNA, 20 nt, synthetic construct
  source 1..20: mol_type = other RNA
caaatgggctctgagccagc

SEQ ID NO: 12867 - RNA, 20 nt, synthetic construct
  source 1..20: mol_type = other RNA
gcactttggcctcacagaag

SEQ ID NO: 12868 - RNA, 20 nt, synthetic construct
  source 1..20: mol_type = other RNA
gagggagaaatgaagtgtgg

SEQ ID NO: 12869 - RNA, 20 nt, synthetic construct
  source 1..20: mol_type = other RNA
cgggccacgctagacatgtg

SEQ ID NO: 12870 - RNA, 20 nt, synthetic construct
  source 1..20: mol_type = other RNA
agcgtggcccgggaccccca

SEQ ID NO: 12871 - RNA, 20 nt, synthetic construct
  source 1..20: mol_type = other RNA
cctgccagagcccgaggaaa

SEQ ID NO: 12872 - RNA, 20 nt, synthetic construct
  source 1..20: mol_type = other RNA
agccctcctcgcaggccacg

SEQ ID NO: 12873 - RNA, 20 nt, synthetic construct
  source 1..20: mol_type = other RNA
gggtccagccctcctcgcag

SEQ ID NO: 12874 - RNA, 20 nt, synthetic construct
  source 1..20: mol_type = other RNA
cagggagggcactgcagcca

SEQ ID NO: 12875 - RNA, 20 nt, synthetic construct
  source 1..20: mol_type = other RNA
tgggggcctacgccgtagac

SEQ ID NO: 12876 - RNA, 20 nt, synthetic construct
  source 1..20: mol_type = other RNA
acggcgtaggcccccaggac

SEQ ID NO: 12877 - RNA, 20 nt, synthetic construct
  source 1..20: mol_type = other RNA
ggagccgggacgtcagcact

SEQ ID NO: 12878 - RNA, 20 nt, synthetic construct
  source 1..20: mol_type = other RNA
cggctcctgactacacacgt

SEQ ID NO: 12879 - RNA, 20 nt, synthetic construct
  source 1..20: mol_type = other RNA
gcactacaggcagcaccagc

SEQ ID NO: 12880 - RNA, 20 nt, synthetic construct
  source 1..20: mol_type = other RNA
cggccccttcgctggtgctg

SEQ ID NO: 12881 - RNA, 20 nt, synthetic construct
  source 1..20: mol_type = other RNA
ctggagctcctgggaggcct

SEQ ID NO: 12882 - RNA, 20 nt, synthetic construct
  source 1..20: mol_type = other RNA
ggggagggtcaagggctggg

SEQ ID NO: 12883 - RNA, 20 nt, synthetic construct
  source 1..20: mol_type = other RNA
agggctggggctgagcttta

SEQ ID NO: 12884 - RNA, 20 nt, synthetic construct
  source 1..20: mol_type = other RNA
gaaccattttaaagctcagc

SEQ ID NO: 12885 - RNA, 20 nt, synthetic construct
  source 1..20: mol_type = other RNA
ctctctcagccctccatggc

SEQ ID NO: 12886 - RNA, 20 nt, synthetic construct
  source 1..20: mol_type = other RNA
agctgtgctcgggtgctgcc

SEQ ID NO: 12887 - RNA, 20 nt, synthetic construct
  source 1..20: mol_type = other RNA
gtgggcagaatgacttttat

SEQ ID NO: 12888 - RNA, 20 nt, synthetic construct
  source 1..20: mol_type = other RNA
ttctgcccacggacatcggc

SEQ ID NO: 12889 - RNA, 20 nt, synthetic construct
  source 1..20: mol_type = other RNA
ccaccaaggaggcaggattc

SEQ ID NO: 12890 - RNA, 20 nt, synthetic construct
  source 1..20: mol_type = other RNA
ctgcagcccctaccgccccc

SEQ ID NO: 12891 - RNA, 20 nt, synthetic construct
  source 1..20: mol_type = other RNA
ccagcctctggctagatgcc

SEQ ID NO: 12892 - RNA, 20 nt, synthetic construct
  source 1..20: mol_type = other RNA
caggctgtgccttggtttcc

SEQ ID NO: 12893 - RNA, 20 nt, synthetic construct
  source 1..20: mol_type = other RNA
taggtgatggctccccgcag

SEQ ID NO: 12894 - RNA, 20 nt, synthetic construct
  source 1..20: mol_type = other RNA
gtcctaggtgatggctcccc

SEQ ID NO: 12895 - RNA, 20 nt, synthetic construct
  source 1..20: mol_type = other RNA
cagccaacccgctccactac

SEQ ID NO: 12896 - RNA, 20 nt, synthetic construct
  source 1..20: mol_type = other RNA
gtgttccccttcccagcctc

SEQ ID NO: 12897 - RNA, 20 nt, synthetic construct
  source 1..20: mol_type = other RNA
ggggagagggccaacaactg

SEQ ID NO: 12898 - RNA, 20 nt, synthetic construct
  source 1..20: mol_type = other RNA
ctccttgagcaccagcccca

SEQ ID NO: 12899 - RNA, 20 nt, synthetic construct
  source 1..20: mol_type = other RNA
gcttgcttgggtggggctgg

SEQ ID NO: 12900 - RNA, 20 nt, synthetic construct
  source 1..20: mol_type = other RNA
gtcctctctgttgccttttt

SEQ ID NO: 12901 - RNA, 20 nt, synthetic construct
  source 1..20: mol_type = other RNA
tctctgttgcctttttacag

SEQ ID NO: 12902 - RNA, 20 nt, synthetic construct
  source 1..20: mol_type = other RNA
agaaaagttggctgtaaaaa

SEQ ID NO: 12903 - RNA, 20 nt, synthetic construct
  source 1..20: mol_type = other RNA
ccatattaataaaaatgcta

SEQ ID NO: 12904 - RNA, 20 nt, synthetic construct
  source 1..20: mol_type = other RNA
taactcttgcatagacttga

SEQ ID NO: 12905 - RNA, 20 nt, synthetic construct
  source 1..20: mol_type = other RNA
atgcaagagttaggacaacg

SEQ ID NO: 12906 - RNA, 20 nt, synthetic construct
  source 1..20: mol_type = other RNA
agtctatgcaagagttagga

SEQ ID NO: 12907 - RNA, 20 nt, synthetic construct
  source 1..20: mol_type = other RNA
tcctgcagctcccctgacca

SEQ ID NO: 12908 - RNA, 20 nt, synthetic construct
  source 1..20: mol_type = other RNA
ggggagctgcaggaagacat

SEQ ID NO: 12909 - RNA, 20 nt, synthetic construct
  source 1..20: mol_type = other RNA
gggtggtcaggggagctgca

SEQ ID NO: 12910 - RNA, 20 nt, synthetic construct
  source 1..20: mol_type = other RNA
aagtgcctcctccttggtga

SEQ ID NO: 12911 - RNA, 20 nt, synthetic construct
  source 1..20: mol_type = other RNA
ccaaggaggaggcactttga

SEQ ID NO: 12912 - RNA, 20 nt, synthetic construct
  source 1..20: mol_type = other RNA
tgacctcccaatgccctttt

SEQ ID NO: 12913 - RNA, 20 nt, synthetic construct
  source 1..20: mol_type = other RNA
ggacaacagagcatctagag

SEQ ID NO: 12914 - RNA, 20 nt, synthetic construct
  source 1..20: mol_type = other RNA
atggcttttttcatgattta

SEQ ID NO: 12915 - RNA, 20 nt, synthetic construct
  source 1..20: mol_type = other RNA
cagattgggtgcaatggctc

SEQ ID NO: 12916 - RNA, 20 nt, synthetic construct
  source 1..20: mol_type = other RNA
tgaattcctaaacacaagca

SEQ ID NO: 12917 - RNA, 20 nt, synthetic construct
  source 1..20: mol_type = other RNA
cactgttgcccagggtcttg

SEQ ID NO: 12918 - RNA, 20 nt, synthetic construct
  source 1..20: mol_type = other RNA
ctataaaaaaatttaaaaga

SEQ ID NO: 12919 - RNA, 20 nt, synthetic construct
  source 1..20: mol_type = other RNA
cggctactcaggaggctgat

SEQ ID NO: 12920 - RNA, 20 nt, synthetic construct
  source 1..20: mol_type = other RNA
cacattgaatgggatcatta

SEQ ID NO: 12921 - RNA, 20 nt, synthetic construct
  source 1..20: mol_type = other RNA
taagcaagttctctctctct

SEQ ID NO: 12922 - RNA, 20 nt, synthetic construct
  source 1..20: mol_type = other RNA
agagagagagagaacttgct

SEQ ID NO: 12923 - RNA, 20 nt, synthetic construct
  source 1..20: mol_type = other RNA
taaggaatctcaggcaaaat

SEQ ID NO: 12924 - RNA, 20 nt, synthetic construct
  source 1..20: mol_type = other RNA
gaaaatgtaatctgggagga

SEQ ID NO: 12925 - RNA, 20 nt, synthetic construct
  source 1..20: mol_type = other RNA
tatatggaaagcattcaaga

SEQ ID NO: 12926 - RNA, 20 nt, synthetic construct
  source 1..20: mol_type = other RNA
actcttgaatgctttccata

SEQ ID NO: 12927 - RNA, 20 nt, synthetic construct
  source 1..20: mol_type = other RNA
agggttgcaccacaggccta

SEQ ID NO: 12928 - RNA, 20 nt, synthetic construct
  source 1..20: mol_type = other RNA
gggtgtggatctctaaccag

SEQ ID NO: 12929 - RNA, 20 nt, synthetic construct
  source 1..20: mol_type = other RNA
ccagggatcggggaggaagg

SEQ ID NO: 12930 - RNA, 20 nt, synthetic construct
  source 1..20: mol_type = other RNA
agattttcgccttcctgcaa

SEQ ID NO: 12931 - RNA, 20 nt, synthetic construct
  source 1..20: mol_type = other RNA
ccttccctatttgctagtcc

SEQ ID NO: 12932 - RNA, 20 nt, synthetic construct
  source 1..20: mol_type = other RNA
cattcctagtggccagcgtt

SEQ ID NO: 12933 - RNA, 20 nt, synthetic construct
  source 1..20: mol_type = other RNA
cagtctcattcctagtggcc

SEQ ID NO: 12934 - RNA, 20 nt, synthetic construct
  source 1..20: mol_type = other RNA
cactgggcttcttgctagat

SEQ ID NO: 12935 - RNA, 20 nt, synthetic construct
  source 1..20: mol_type = other RNA
ctggtcacactgggcttctt

SEQ ID NO: 12936 - RNA, 20 nt, synthetic construct
  source 1..20: mol_type = other RNA
ccagcatagatcgtgtcgct

SEQ ID NO: 12937 - RNA, 20 nt, synthetic construct
  source 1..20: mol_type = other RNA
ccattcatctccaccaaagc

SEQ ID NO: 12938 - RNA, 20 nt, synthetic construct
  source 1..20: mol_type = other RNA
gcccctccagagaaaagaac

SEQ ID NO: 12939 - RNA, 20 nt, synthetic construct
  source 1..20: mol_type = other RNA
tctgagcctgttgctgttct

SEQ ID NO: 12940 - RNA, 20 nt, synthetic construct
  source 1..20: mol_type = other RNA
cctttattagtgtaaagtac

SEQ ID NO: 12941 - RNA, 20 nt, synthetic construct
  source 1..20: mol_type = other RNA
tgccgccattcttcatatat

SEQ ID NO: 12942 - RNA, 20 nt, synthetic construct
  source 1..20: mol_type = other RNA
gcttgttccaagctcagaag

SEQ ID NO: 12943 - RNA, 20 nt, synthetic construct
  source 1..20: mol_type = other RNA
tgccccaccttccctgctaa

SEQ ID NO: 12944 - RNA, 20 nt, synthetic construct
  source 1..20: mol_type = other RNA
gatgatacggcactctagtt

SEQ ID NO: 12945 - RNA, 20 nt, synthetic construct
  source 1..20: mol_type = other RNA
gttttaggaactagagtgcc

SEQ ID NO: 12946 - RNA, 20 nt, synthetic construct
  source 1..20: mol_type = other RNA
gtgaccgtgtgaggactcca

SEQ ID NO: 12947 - RNA, 20 nt, synthetic construct
  source 1..20: mol_type = other RNA
ctgacaactacagtcagttt

SEQ ID NO: 12948 - RNA, 20 nt, synthetic construct
  source 1..20: mol_type = other RNA
tcacacggtcactgacaact

SEQ ID NO: 12949 - RNA, 20 nt, synthetic construct
  source 1..20: mol_type = other RNA
tggtgagatgcccgctggga

SEQ ID NO: 12950 - RNA, 20 nt, synthetic construct
  source 1..20: mol_type = other RNA
gcaaacagagcaggaattgc

SEQ ID NO: 12951 - RNA, 20 nt, synthetic construct
  source 1..20: mol_type = other RNA
tttttactgccaattttttg

SEQ ID NO: 12952 - RNA, 20 nt, synthetic construct
  source 1..20: mol_type = other RNA
taactgtcactgttgtacta

SEQ ID NO: 12953 - RNA, 20 nt, synthetic construct
  source 1..20: mol_type = other RNA
ctgttgtactacattaaaaa

SEQ ID NO: 12954 - RNA, 20 nt, synthetic construct
  source 1..20: mol_type = other RNA
tcagcaggttcattgactgt

SEQ ID NO: 12955 - RNA, 20 nt, synthetic construct
  source 1..20: mol_type = other RNA
atgaacctgctgatgacttt

SEQ ID NO: 12956 - RNA, 20 nt, synthetic construct
  source 1..20: mol_type = other RNA
gcaatcaagtggttaccagc

SEQ ID NO: 12957 - RNA, 20 nt, synthetic construct
  source 1..20: mol_type = other RNA
ttgcagcaacaatataagca

SEQ ID NO: 12958 - RNA, 20 nt, synthetic construct
  source 1..20: mol_type = other RNA
accgtgtatattatacgctt

SEQ ID NO: 12959 - RNA, 20 nt, synthetic construct
  source 1..20: mol_type = other RNA
tcactgtaaagcttcatcag

SEQ ID NO: 12960 - RNA, 20 nt, synthetic construct
  source 1..20: mol_type = other RNA
ccttatttcctatggaaaca

SEQ ID NO: 12961 - RNA, 20 nt, synthetic construct
  source 1..20: mol_type = other RNA
ccagcgatgatatcccagtg

SEQ ID NO: 12962 - RNA, 20 nt, synthetic construct
  source 1..20: mol_type = other RNA
tgtcccacacaatctcttgg

SEQ ID NO: 12963 - RNA, 20 nt, synthetic construct
  source 1..20: mol_type = other RNA
cacacaatctcttggtgagg

SEQ ID NO: 12964 - RNA, 20 nt, synthetic construct
  source 1..20: mol_type = other RNA
tactgtttcccctaccctat

SEQ ID NO: 12965 - RNA, 20 nt, synthetic construct
  source 1..20: mol_type = other RNA
tgcagtttgaaatgtgatgt

SEQ ID NO: 12966 - RNA, 20 nt, synthetic construct
  source 1..20: mol_type = other RNA
gaagtttgccactcgcctct

SEQ ID NO: 12967 - RNA, 20 nt, synthetic construct
  source 1..20: mol_type = other RNA
gtttctctaagggtacagtt

SEQ ID NO: 12968 - RNA, 20 nt, synthetic construct
  source 1..20: mol_type = other RNA
aacacactgagaagatggaa

SEQ ID NO: 12969 - RNA, 20 nt, synthetic construct
  source 1..20: mol_type = other RNA
cagaataacaatgaagtctg

SEQ ID NO: 12970 - RNA, 20 nt, synthetic construct
  source 1..20: mol_type = other RNA
gacagcacagaaaccctcac

SEQ ID NO: 12971 - RNA, 20 nt, synthetic construct
  source 1..20: mol_type = other RNA
gacttcattgttattctgtg

SEQ ID NO: 12972 - RNA, 20 nt, synthetic construct
  source 1..20: mol_type = other RNA
tttcattctctggcagtgag

SEQ ID NO: 12973 - RNA, 20 nt, synthetic construct
  source 1..20: mol_type = other RNA
ggctgctgtggcattgtgtg

SEQ ID NO: 12974 - RNA, 20 nt, synthetic construct
  source 1..20: mol_type = other RNA
cagaggcgcagccagccctg

SEQ ID NO: 12975 - RNA, 20 nt, synthetic construct
  source 1..20: mol_type = other RNA
gatttgccaagtcacagagg

SEQ ID NO: 12976 - RNA, 20 nt, synthetic construct
  source 1..20: mol_type = other RNA
tgccttattttcatctcacc

SEQ ID NO: 12977 - RNA, 20 nt, synthetic construct
  source 1..20: mol_type = other RNA
tatttccaaagtatagcacc

SEQ ID NO: 12978 - RNA, 20 nt, synthetic construct
  source 1..20: mol_type = other RNA
aggtttaagatttattttcc

SEQ ID NO: 12979 - RNA, 20 nt, synthetic construct
  source 1..20: mol_type = other RNA
gtcaaggtttaagatttatt

SEQ ID NO: 12980 - RNA, 20 nt, synthetic construct
  source 1..20: mol_type = other RNA
tgttgaggagaaacaaattc

SEQ ID NO: 12981 - RNA, 20 nt, synthetic construct
  source 1..20: mol_type = other RNA
taaatcatgtgatctgcaat

SEQ ID NO: 12982 - RNA, 20 nt, synthetic construct
  source 1..20: mol_type = other RNA
ccaagcattaaaaagataat

SEQ ID NO: 12983 - RNA, 20 nt, synthetic construct
  source 1..20: mol_type = other RNA
aataatgcaccctgtacttc

SEQ ID NO: 12984 - RNA, 20 nt, synthetic construct
  source 1..20: mol_type = other RNA
agatgagaaccctatgcata

SEQ ID NO: 12985 - RNA, 20 nt, synthetic construct
  source 1..20: mol_type = other RNA
ccctatttgtatagaatttc

SEQ ID NO: 12986 - RNA, 20 nt, synthetic construct
  source 1..20: mol_type = other RNA
gtgtaaattgacttaattac

SEQ ID NO: 12987 - RNA, 20 nt, synthetic construct
  source 1..20: mol_type = other RNA
atttacacagacctttgtat

SEQ ID NO: 12988 - RNA, 20 nt, synthetic construct
  source 1..20: mol_type = other RNA
gccactggctctatttccga

SEQ ID NO: 12989 - RNA, 20 nt, synthetic construct
  source 1..20: mol_type = other RNA
atatgtggattcacatttct

SEQ ID NO: 12990 - RNA, 20 nt, synthetic construct
  source 1..20: mol_type = other RNA
cgggagcgtggtctatatgt

SEQ ID NO: 12991 - RNA, 20 nt, synthetic construct
  source 1..20: mol_type = other RNA
cagcagctttcccagtccaa

SEQ ID NO: 12992 - RNA, 20 nt, synthetic construct
  source 1..20: mol_type = other RNA
aatctccaggctcttccaaa

SEQ ID NO: 12993 - RNA, 20 nt, synthetic construct
  source 1..20: mol_type = other RNA
tgactcctctcaggctgggc

SEQ ID NO: 12994 - RNA, 20 nt, synthetic construct
  source 1..20: mol_type = other RNA
agacacaatactggatgctc

SEQ ID NO: 12995 - RNA, 20 nt, synthetic construct
  source 1..20: mol_type = other RNA
cttctcaactcaccaatcat

SEQ ID NO: 12996 - RNA, 20 nt, synthetic construct
  source 1..20: mol_type = other RNA
gcatagaaaaccttttctct

SEQ ID NO: 12997 - RNA, 20 nt, synthetic construct
  source 1..20: mol_type = other RNA
tcatctggcaacttaatgca

SEQ ID NO: 12998 - RNA, 20 nt, synthetic construct
  source 1..20: mol_type = other RNA
aatattagatgtaatagtta

SEQ ID NO: 12999 - RNA, 20 nt, synthetic construct
  source 1..20: mol_type = other RNA
gtgaaacaacccagcgactt

SEQ ID NO: 13000 - RNA, 20 nt, synthetic construct
  source 1..20: mol_type = other RNA
ctgggttgtttcactgacta

SEQ ID NO: 13001 - RNA, 20 nt, synthetic construct
  source 1..20: mol_type = other RNA
aaagtcacaatgctactctg

SEQ ID NO: 13002 - RNA, 20 nt, synthetic construct
  source 1..20: mol_type = other RNA
caatgctactctgcacccat

SEQ ID NO: 13003 - RNA, 20 nt, synthetic construct
  source 1..20: mol_type = other RNA
ctcctgggtctgaaggctac

SEQ ID NO: 13004 - RNA, 20 nt, synthetic construct
  source 1..20: mol_type = other RNA
gaaggctacctctgttacca

SEQ ID NO: 13005 - RNA, 20 nt, synthetic construct
  source 1..20: mol_type = other RNA
ttgctcctccccaccccagc

SEQ ID NO: 13006 - RNA, 20 nt, synthetic construct
  source 1..20: mol_type = other RNA
ctctaaagtgacaacctaag

SEQ ID NO: 13007 - RNA, 20 nt, synthetic construct
  source 1..20: mol_type = other RNA
ctttagagagactgtccttg

SEQ ID NO: 13008 - RNA, 20 nt, synthetic construct
  source 1..20: mol_type = other RNA
cttatgcctgtaatcccagc

SEQ ID NO: 13009 - RNA, 20 nt, synthetic construct
  source 1..20: mol_type = other RNA
cccaggctggagtgcagtgg

SEQ ID NO: 13010 - RNA, 20 nt, synthetic construct
  source 1..20: mol_type = other RNA
tgcttgatctagcacctgcg

SEQ ID NO: 13011 - RNA, 20 nt, synthetic construct
  source 1..20: mol_type = other RNA
tcagcccctctctgcctaca

SEQ ID NO: 13012 - RNA, 20 nt, synthetic construct
  source 1..20: mol_type = other RNA
ctctcctccacctgtcatca

SEQ ID NO: 13013 - RNA, 20 nt, synthetic construct
  source 1..20: mol_type = other RNA
gggatgacatgggggtgctg

SEQ ID NO: 13014 - RNA, 20 nt, synthetic construct
  source 1..20: mol_type = other RNA
tcccggacagctccctttga

SEQ ID NO: 13015 - RNA, 20 nt, synthetic construct
  source 1..20: mol_type = other RNA
gtgttccttatctcacacac

SEQ ID NO: 13016 - RNA, 20 nt, synthetic construct
  source 1..20: mol_type = other RNA
gaggtctttaaggtatgcca

SEQ ID NO: 13017 - RNA, 20 nt, synthetic construct
  source 1..20: mol_type = other RNA
ttaaggtatgccaagtggag

SEQ ID NO: 13018 - RNA, 20 nt, synthetic construct
  source 1..20: mol_type = other RNA
agaacaagagagctggatgt

SEQ ID NO: 13019 - RNA, 20 nt, synthetic construct
  source 1..20: mol_type = other RNA
ctaacctgtatcctcctgcc

SEQ ID NO: 13020 - RNA, 20 nt, synthetic construct
  source 1..20: mol_type = other RNA
agaagaggcagtactaggaa

SEQ ID NO: 13021 - RNA, 20 nt, synthetic construct
  source 1..20: mol_type = other RNA
ccttcctagtactgcctctt

SEQ ID NO: 13022 - RNA, 20 nt, synthetic construct
  source 1..20: mol_type = other RNA
ggaaagccctggaatagtgt

SEQ ID NO: 13023 - RNA, 20 nt, synthetic construct
  source 1..20: mol_type = other RNA
gctaagatgaggcctgaaag

SEQ ID NO: 13024 - RNA, 20 nt, synthetic construct
  source 1..20: mol_type = other RNA
ccccaactgctgagttggag

SEQ ID NO: 13025 - RNA, 20 nt, synthetic construct
  source 1..20: mol_type = other RNA
aagtttggctgcaaagaaga

SEQ ID NO: 13026 - RNA, 20 nt, synthetic construct
  source 1..20: mol_type = other RNA
aagcctctcttctccctgtt

SEQ ID NO: 13027 - RNA, 20 nt, synthetic construct
  source 1..20: mol_type = other RNA
aagcctctcttctgccctgt

SEQ ID NO: 13028 - RNA, 20 nt, synthetic construct
  source 1..20: mol_type = other RNA
cagcacactggtttctcttc

SEQ ID NO: 13029 - RNA, 20 nt, synthetic construct
  source 1..20: mol_type = other RNA
ctgggaagggtctggcaggg

SEQ ID NO: 13030 - RNA, 20 nt, synthetic construct
  source 1..20: mol_type = other RNA
ggcagggtggagcgttctgg

SEQ ID NO: 13031 - RNA, 20 nt, synthetic construct
  source 1..20: mol_type = other RNA
acccaaagcccctagcgctc

SEQ ID NO: 13032 - RNA, 20 nt, synthetic construct
  source 1..20: mol_type = other RNA
caggagaggagacaagaaca

SEQ ID NO: 13033 - RNA, 20 nt, synthetic construct
  source 1..20: mol_type = other RNA
cctctcctgtgacagtggga

SEQ ID NO: 13034 - RNA, 20 nt, synthetic construct
  source 1..20: mol_type = other RNA
caggagagctcctgcggcca

SEQ ID NO: 13035 - RNA, 20 nt, synthetic construct
  source 1..20: mol_type = other RNA
ctccacacattacctcatca

SEQ ID NO: 13036 - RNA, 20 nt, synthetic construct
  source 1..20: mol_type = other RNA
catcactgtgctgggctgca

SEQ ID NO: 13037 - RNA, 20 nt, synthetic construct
  source 1..20: mol_type = other RNA
ccctgattttacagaaaggt

SEQ ID NO: 13038 - RNA, 20 nt, synthetic construct
  source 1..20: mol_type = other RNA
tttttttttaagtgttatct

SEQ ID NO: 13039 - RNA, 20 nt, synthetic construct
  source 1..20: mol_type = other RNA
cttcacagtacttggtacag

SEQ ID NO: 13040 - RNA, 20 nt, synthetic construct
  source 1..20: mol_type = other RNA
cctctgtggtcccttcacag

SEQ ID NO: 13041 - RNA, 20 nt, synthetic construct
  source 1..20: mol_type = other RNA
gtaactttccttaacagcag

SEQ ID NO: 13042 - RNA, 20 nt, synthetic construct
  source 1..20: mol_type = other RNA
ttccaatagtctgtaacttt

SEQ ID NO: 13043 - RNA, 20 nt, synthetic construct
  source 1..20: mol_type = other RNA
gttaatcattacgtctttcc

SEQ ID NO: 13044 - RNA, 20 nt, synthetic construct
  source 1..20: mol_type = other RNA
aaattttcttggactcccct

SEQ ID NO: 13045 - RNA, 20 nt, synthetic construct
  source 1..20: mol_type = other RNA
aagaaaattttgacatgtat

SEQ ID NO: 13046 - RNA, 20 nt, synthetic construct
  source 1..20: mol_type = other RNA
acatttccaggaaggctggt

SEQ ID NO: 13047 - RNA, 20 nt, synthetic construct
  source 1..20: mol_type = other RNA
ctcgtttgctctcaccagcc

SEQ ID NO: 13048 - RNA, 20 nt, synthetic construct
  source 1..20: mol_type = other RNA
cgatgaagccagggcacagg

SEQ ID NO: 13049 - RNA, 20 nt, synthetic construct
  source 1..20: mol_type = other RNA
aaagagttaccagcgctgcc

SEQ ID NO: 13050 - RNA, 20 nt, synthetic construct
  source 1..20: mol_type = other RNA
ttgtgtgcaaagggcagcct

SEQ ID NO: 13051 - RNA, 20 nt, synthetic construct
  source 1..20: mol_type = other RNA
gcatgtccttgtgtgcaaag

SEQ ID NO: 13052 - RNA, 20 nt, synthetic construct
  source 1..20: mol_type = other RNA
ccgttctcattggcaggact

SEQ ID NO: 13053 - RNA, 20 nt, synthetic construct
  source 1..20: mol_type = other RNA
tgccaatgagaacggagaca

SEQ ID NO: 13054 - RNA, 20 nt, synthetic construct
  source 1..20: mol_type = other RNA
gagagtagtcctgccaatga

SEQ ID NO: 13055 - RNA, 20 nt, synthetic construct
  source 1..20: mol_type = other RNA
tgcagaagattcaaacacaa

SEQ ID NO: 13056 - RNA, 20 nt, synthetic construct
  source 1..20: mol_type = other RNA
tgtgtttgaatcttctgcag

SEQ ID NO: 13057 - RNA, 20 nt, synthetic construct
  source 1..20: mol_type = other RNA
tcttgtgtttgaatcttctg

SEQ ID NO: 13058 - RNA, 20 nt, synthetic construct
  source 1..20: mol_type = other RNA
tccctggcggttgctgctgc

SEQ ID NO: 13059 - RNA, 20 nt, synthetic construct
  source 1..20: mol_type = other RNA
gatgaaaggtagtcttccct

SEQ ID NO: 13060 - RNA, 20 nt, synthetic construct
  source 1..20: mol_type = other RNA
cactgaaggtcagatgaaag

SEQ ID NO: 13061 - RNA, 20 nt, synthetic construct
  source 1..20: mol_type = other RNA
ccagaaccccctcaacccct

SEQ ID NO: 13062 - RNA, 20 nt, synthetic construct
  source 1..20: mol_type = other RNA
ctttttgtgaccagactgcc

SEQ ID NO: 13063 - RNA, 20 nt, synthetic construct
  source 1..20: mol_type = other RNA
caaaaagggacaggggttga

SEQ ID NO: 13064 - RNA, 20 nt, synthetic construct
  source 1..20: mol_type = other RNA
ggtcacaaaaagggacaggg

SEQ ID NO: 13065 - RNA, 20 nt, synthetic construct
  source 1..20: mol_type = other RNA
tacaggttgggcagtctggt

SEQ ID NO: 13066 - RNA, 20 nt, synthetic construct
  source 1..20: mol_type = other RNA
agaaggaaagtcatacaggt

SEQ ID NO: 13067 - RNA, 20 nt, synthetic construct
  source 1..20: mol_type = other RNA
aaatcacttatggaggattt

SEQ ID NO: 13068 - RNA, 20 nt, synthetic construct
  source 1..20: mol_type = other RNA
cttgtttttgcgtggtctaa

SEQ ID NO: 13069 - RNA, 20 nt, synthetic construct
  source 1..20: mol_type = other RNA
ctaatgaaacatcaactgga

SEQ ID NO: 13070 - RNA, 20 nt, synthetic construct
  source 1..20: mol_type = other RNA
agtaatgttctgacatctga

SEQ ID NO: 13071 - RNA, 20 nt, synthetic construct
  source 1..20: mol_type = other RNA
gaacattactggacaccaca

SEQ ID NO: 13072 - RNA, 20 nt, synthetic construct
  source 1..20: mol_type = other RNA
aaaatgccatcagaggtgac

SEQ ID NO: 13073 - RNA, 20 nt, synthetic construct
  source 1..20: mol_type = other RNA
cctctgatggcatttttgac

SEQ ID NO: 13074 - RNA, 20 nt, synthetic construct
  source 1..20: mol_type = other RNA
taaaagcatcccaagtaggg

SEQ ID NO: 13075 - RNA, 20 nt, synthetic construct
  source 1..20: mol_type = other RNA
acccagaccttccatcacat

SEQ ID NO: 13076 - RNA, 20 nt, synthetic construct
  source 1..20: mol_type = other RNA
gggtagacttgtaccctact

SEQ ID NO: 13077 - RNA, 20 nt, synthetic construct
  source 1..20: mol_type = other RNA
tgaatcgctttatgtgatgg

SEQ ID NO: 13078 - RNA, 20 nt, synthetic construct
  source 1..20: mol_type = other RNA
agtattgcttcttatatcat

SEQ ID NO: 13079 - RNA, 20 nt, synthetic construct
  source 1..20: mol_type = other RNA
taacttcataggggaaaagg

SEQ ID NO: 13080 - RNA, 20 nt, synthetic construct
  source 1..20: mol_type = other RNA
taatacatatgtcttaactt

SEQ ID NO: 13081 - RNA, 20 nt, synthetic construct
  source 1..20: mol_type = other RNA
gtctccatattcagttctag

SEQ ID NO: 13082 - RNA, 20 nt, synthetic construct
  source 1..20: mol_type = other RNA
ccatattcagttctagagat

SEQ ID NO: 13083 - RNA, 20 nt, synthetic construct
  source 1..20: mol_type = other RNA
ggaaaaatctctagaactga

SEQ ID NO: 13084 - RNA, 20 nt, synthetic construct
  source 1..20: mol_type = other RNA
tgcagctaaggagtacttca

SEQ ID NO: 13085 - RNA, 20 nt, synthetic construct
  source 1..20: mol_type = other RNA
tcaggtgtcctgcagctaag

SEQ ID NO: 13086 - RNA, 20 nt, synthetic construct
  source 1..20: mol_type = other RNA
ttatatttgtgattctactt

SEQ ID NO: 13087 - RNA, 20 nt, synthetic construct
  source 1..20: mol_type = other RNA
aattcatggagacagaaatt

SEQ ID NO: 13088 - RNA, 20 nt, synthetic construct
  source 1..20: mol_type = other RNA
ccatgaatttgactactcta

SEQ ID NO: 13089 - RNA, 20 nt, synthetic construct
  source 1..20: mol_type = other RNA
gtcttcaataggtccagagt

SEQ ID NO: 13090 - RNA, 20 nt, synthetic construct
  source 1..20: mol_type = other RNA
tcaataggtccagagtttca

SEQ ID NO: 13091 - RNA, 20 nt, synthetic construct
  source 1..20: mol_type = other RNA
agagtttcagtttcagaaga

SEQ ID NO: 13092 - RNA, 20 nt, synthetic construct
  source 1..20: mol_type = other RNA
ctgaactatacacttaaaaa

SEQ ID NO: 13093 - RNA, 20 nt, synthetic construct
  source 1..20: mol_type = other RNA
atcagcctgtgttcaagttt

SEQ ID NO: 13094 - RNA, 20 nt, synthetic construct
  source 1..20: mol_type = other RNA
tagagtgaaaacttgaacac

SEQ ID NO: 13095 - RNA, 20 nt, synthetic construct
  source 1..20: mol_type = other RNA
cttaaactacccatgatata

SEQ ID NO: 13096 - RNA, 20 nt, synthetic construct
  source 1..20: mol_type = other RNA
tatatcatgggtagtttaag

SEQ ID NO: 13097 - RNA, 20 nt, synthetic construct
  source 1..20: mol_type = other RNA
agaaccttgcctgtattatc

SEQ ID NO: 13098 - RNA, 20 nt, synthetic construct
  source 1..20: mol_type = other RNA
cctgtagctcctgagcactt

SEQ ID NO: 13099 - RNA, 20 nt, synthetic construct
  source 1..20: mol_type = other RNA
ctaacctcagaatagccttt

SEQ ID NO: 13100 - RNA, 20 nt, synthetic construct
  source 1..20: mol_type = other RNA
gaaaggcaggaatcagggca

SEQ ID NO: 13101 - RNA, 20 nt, synthetic construct
  source 1..20: mol_type = other RNA
ctcttttaatacttcccctc

SEQ ID NO: 13102 - RNA, 20 nt, synthetic construct
  source 1..20: mol_type = other RNA
gggcctgcttgcttggaagg

SEQ ID NO: 13103 - RNA, 20 nt, synthetic construct
  source 1..20: mol_type = other RNA
gattctccaggtatcaaaac

SEQ ID NO: 13104 - RNA, 20 nt, synthetic construct
  source 1..20: mol_type = other RNA
catatgagcagaaggggaac

SEQ ID NO: 13105 - RNA, 20 nt, synthetic construct
  source 1..20: mol_type = other RNA
ctcttgctcaaaagtaagta

SEQ ID NO: 13106 - RNA, 20 nt, synthetic construct
  source 1..20: mol_type = other RNA
aatttcttgtcactcttgct

SEQ ID NO: 13107 - RNA, 20 nt, synthetic construct
  source 1..20: mol_type = other RNA
ctgctaccagtgtgtcaaat

SEQ ID NO: 13108 - RNA, 20 nt, synthetic construct
  source 1..20: mol_type = other RNA
acatgattactgtggtgcat

SEQ ID NO: 13109 - RNA, 20 nt, synthetic construct
  source 1..20: mol_type = other RNA
ttttctcttccctcagcttt

SEQ ID NO: 13110 - RNA, 20 nt, synthetic construct
  source 1..20: mol_type = other RNA
tttattgttaaaatgtcctt

SEQ ID NO: 13111 - RNA, 20 nt, synthetic construct
  source 1..20: mol_type = other RNA
cttggagccattttcagttg

SEQ ID NO: 13112 - RNA, 20 nt, synthetic construct
  source 1..20: mol_type = other RNA
atttttagaacaagagagct

SEQ ID NO: 13113 - RNA, 20 nt, synthetic construct
  source 1..20: mol_type = other RNA
ggcaccaccatgcttttagt

SEQ ID NO: 13114 - RNA, 20 nt, synthetic construct
  source 1..20: mol_type = other RNA
aacttgcagcaccatgtatg

SEQ ID NO: 13115 - RNA, 20 nt, synthetic construct
  source 1..20: mol_type = other RNA
ctaggtgaataatcaggcag

SEQ ID NO: 13116 - RNA, 20 nt, synthetic construct
  source 1..20: mol_type = other RNA
gttcagcaattatcacctgc

SEQ ID NO: 13117 - RNA, 20 nt, synthetic construct
  source 1..20: mol_type = other RNA
ggagtttgagaccagcctga

SEQ ID NO: 13118 - RNA, 20 nt, synthetic construct
  source 1..20: mol_type = other RNA
caaactcctgacctcaagtg

SEQ ID NO: 13119 - RNA, 20 nt, synthetic construct
  source 1..20: mol_type = other RNA
gtctctacaaaaaaatacaa

SEQ ID NO: 13120 - RNA, 20 nt, synthetic construct
  source 1..20: mol_type = other RNA
ctacaaaaaaatacaaaaat

SEQ ID NO: 13121 - RNA, 20 nt, synthetic construct
  source 1..20: mol_type = other RNA
agagtgcagtggcatgatct

SEQ ID NO: 13122 - RNA, 20 nt, synthetic construct
  source 1..20: mol_type = other RNA
tccagtctagagtgcagtgg

SEQ ID NO: 13123 - RNA, 20 nt, synthetic construct
  source 1..20: mol_type = other RNA
cactttgtcttccagtctag

SEQ ID NO: 13124 - RNA, 20 nt, synthetic construct
  source 1..20: mol_type = other RNA
caaaaataaataaataaata

SEQ ID NO: 13125 - RNA, 20 nt, synthetic construct
  source 1..20: mol_type = other RNA
tgctcttgaggagtttatag

SEQ ID NO: 13126 - RNA, 20 nt, synthetic construct
  source 1..20: mol_type = other RNA
ggaacttaaaaactataaac

SEQ ID NO: 13127 - RNA, 20 nt, synthetic construct
  source 1..20: mol_type = other RNA
gagccacacacaggccgtct

SEQ ID NO: 13128 - RNA, 20 nt, synthetic construct
  source 1..20: mol_type = other RNA
actcttaagttgtttgggca

SEQ ID NO: 13129 - RNA, 20 nt, synthetic construct
  source 1..20: mol_type = other RNA
ttttacctatagtaagcgta

SEQ ID NO: 13130 - RNA, 20 nt, synthetic construct
  source 1..20: mol_type = other RNA
ggctcatgaaatgtgaatgt

SEQ ID NO: 13131 - RNA, 20 nt, synthetic construct
  source 1..20: mol_type = other RNA
caggttttggtttttctctc

SEQ ID NO: 13132 - RNA, 20 nt, synthetic construct
  source 1..20: mol_type = other RNA
ggaaggtgtagcttgggatt

SEQ ID NO: 13133 - RNA, 20 nt, synthetic construct
  source 1..20: mol_type = other RNA
gaaaaattaaaacccaggga

SEQ ID NO: 13134 - RNA, 20 nt, synthetic construct
  source 1..20: mol_type = other RNA
gggccactgggctccctcat

SEQ ID NO: 13135 - RNA, 20 nt, synthetic construct
  source 1..20: mol_type = other RNA
ggtcagggccactgggctcc

SEQ ID NO: 13136 - RNA, 20 nt, synthetic construct
  source 1..20: mol_type = other RNA
ctgtagatcccaccgagagt

SEQ ID NO: 13137 - RNA, 20 nt, synthetic construct
  source 1..20: mol_type = other RNA
atagtaaatatgtggataat

SEQ ID NO: 13138 - RNA, 20 nt, synthetic construct
  source 1..20: mol_type = other RNA
tatgcacaaatgtctatagt

SEQ ID NO: 13139 - RNA, 20 nt, synthetic construct
  source 1..20: mol_type = other RNA
caaacacaaatttgactcgc

SEQ ID NO: 13140 - RNA, 20 nt, synthetic construct
  source 1..20: mol_type = other RNA
aatttgtgtttgagacagaa

SEQ ID NO: 13141 - RNA, 20 nt, synthetic construct
  source 1..20: mol_type = other RNA
tagccacgggtgctttcttt

SEQ ID NO: 13142 - RNA, 20 nt, synthetic construct
  source 1..20: mol_type = other RNA
aacactaaattaatctcttg

SEQ ID NO: 13143 - RNA, 20 nt, synthetic construct
  source 1..20: mol_type = other RNA
tgtattggtggtggtggtgt

SEQ ID NO: 13144 - RNA, 20 nt, synthetic construct
  source 1..20: mol_type = other RNA
ctgtgcccaactaatttctt

SEQ ID NO: 13145 - RNA, 20 nt, synthetic construct
  source 1..20: mol_type = other RNA
cagctatacaggaggctgag

SEQ ID NO: 13146 - RNA, 20 nt, synthetic construct
  source 1..20: mol_type = other RNA
taggcacaaatgatcctttt

SEQ ID NO: 13147 - RNA, 20 nt, synthetic construct
  source 1..20: mol_type = other RNA
tagctcactgtagcctcaaa

SEQ ID NO: 13148 - RNA, 20 nt, synthetic construct
  source 1..20: mol_type = other RNA
ccctctgttgcccaggctgg

SEQ ID NO: 13149 - RNA, 20 nt, synthetic construct
  source 1..20: mol_type = other RNA
tgaaaaaaagaaaacaaaac

SEQ ID NO: 13150 - RNA, 20 nt, synthetic construct
  source 1..20: mol_type = other RNA
attcatttcctatctatgtg

SEQ ID NO: 13151 - RNA, 20 nt, synthetic construct
  source 1..20: mol_type = other RNA
tcataacccacagagaacta

SEQ ID NO: 13152 - RNA, 20 nt, synthetic construct
  source 1..20: mol_type = other RNA
tatccctaaggagcaataat

SEQ ID NO: 13153 - RNA, 20 nt, synthetic construct
  source 1..20: mol_type = other RNA
gtaaaagcactaggaccaaa

SEQ ID NO: 13154 - RNA, 20 nt, synthetic construct
  source 1..20: mol_type = other RNA
tagtgcttttacagactttg

SEQ ID NO: 13155 - RNA, 20 nt, synthetic construct
  source 1..20: mol_type = other RNA
tttcttactcaaaactcttt

SEQ ID NO: 13156 - RNA, 20 nt, synthetic construct
  source 1..20: mol_type = other RNA
ccaaattccaatgattctct

SEQ ID NO: 13157 - RNA, 20 nt, synthetic construct
  source 1..20: mol_type = other RNA
gtcccttgccccaccacagg

SEQ ID NO: 13158 - RNA, 20 nt, synthetic construct
  source 1..20: mol_type = other RNA
cttgccccaccacaggcctt

SEQ ID NO: 13159 - RNA, 20 nt, synthetic construct
  source 1..20: mol_type = other RNA
gggaatattctgagtgtgaa

SEQ ID NO: 13160 - RNA, 20 nt, synthetic construct
  source 1..20: mol_type = other RNA
tctagttcccaatcttgcat

SEQ ID NO: 13161 - RNA, 20 nt, synthetic construct
  source 1..20: mol_type = other RNA
atagtgtctaagatttgata

SEQ ID NO: 13162 - RNA, 20 nt, synthetic construct
  source 1..20: mol_type = other RNA
aagatttgataaactataaa

SEQ ID NO: 13163 - RNA, 20 nt, synthetic construct
  source 1..20: mol_type = other RNA
ccctcagaggtacatttctg

SEQ ID NO: 13164 - RNA, 20 nt, synthetic construct
  source 1..20: mol_type = other RNA
cctgcactacagttgtttgt

SEQ ID NO: 13165 - RNA, 20 nt, synthetic construct
  source 1..20: mol_type = other RNA
tgctccctcactcaactgtg

SEQ ID NO: 13166 - RNA, 20 nt, synthetic construct
  source 1..20: mol_type = other RNA
aatgcatttggtttagaggc

SEQ ID NO: 13167 - RNA, 20 nt, synthetic construct
  source 1..20: mol_type = other RNA
tgtgtctaatgcatttggtt

SEQ ID NO: 13168 - RNA, 20 nt, synthetic construct
  source 1..20: mol_type = other RNA
gtcatgtgtctaatgcattt

SEQ ID NO: 13169 - RNA, 20 nt, synthetic construct
  source 1..20: mol_type = other RNA
caataaatgcagaccaaatg

SEQ ID NO: 13170 - RNA, 20 nt, synthetic construct
  source 1..20: mol_type = other RNA
gcatttattgagaccaaatc

SEQ ID NO: 13171 - RNA, 20 nt, synthetic construct
  source 1..20: mol_type = other RNA
ttttattatttctccattca

SEQ ID NO: 13172 - RNA, 20 nt, synthetic construct
  source 1..20: mol_type = other RNA
acaagtgtttataaataaaa

SEQ ID NO: 13173 - RNA, 20 nt, synthetic construct
  source 1..20: mol_type = other RNA
gaacagttatgacttaccaa

SEQ ID NO: 13174 - RNA, 20 nt, synthetic construct
  source 1..20: mol_type = other RNA
taactgttctgactcacttt

SEQ ID NO: 13175 - RNA, 20 nt, synthetic construct
  source 1..20: mol_type = other RNA
gccagaaggtgatagagcta

SEQ ID NO: 13176 - RNA, 20 nt, synthetic construct
  source 1..20: mol_type = other RNA
agggtcggccagaaggtgat

SEQ ID NO: 13177 - RNA, 20 nt, synthetic construct
  source 1..20: mol_type = other RNA
atactgctttctaggcctta

SEQ ID NO: 13178 - RNA, 20 nt, synthetic construct
  source 1..20: mol_type = other RNA
gggaactgaaataaacaacc

SEQ ID NO: 13179 - RNA, 20 nt, synthetic construct
  source 1..20: mol_type = other RNA
ctaaacagatccgattttat

SEQ ID NO: 13180 - RNA, 20 nt, synthetic construct
  source 1..20: mol_type = other RNA
atatcctagtttgttttcca

SEQ ID NO: 13181 - RNA, 20 nt, synthetic construct
  source 1..20: mol_type = other RNA
gcttataaaatagaaaaatg

SEQ ID NO: 13182 - RNA, 20 nt, synthetic construct
  source 1..20: mol_type = other RNA
tttcccacttttatacatat

SEQ ID NO: 13183 - RNA, 20 nt, synthetic construct
  source 1..20: mol_type = other RNA
gtcatagaggaagaaactgc

SEQ ID NO: 13184 - RNA, 20 nt, synthetic construct
  source 1..20: mol_type = other RNA
tagaggaagaaactgcccaa

SEQ ID NO: 13185 - RNA, 20 nt, synthetic construct
  source 1..20: mol_type = other RNA
tataattagtaaatagcaaa

SEQ ID NO: 13186 - RNA, 20 nt, synthetic construct
  source 1..20: mol_type = other RNA
gtagagaaaaggctgagggc

SEQ ID NO: 13187 - RNA, 20 nt, synthetic construct
  source 1..20: mol_type = other RNA
ttaggctcttattataatat

SEQ ID NO: 13188 - RNA, 20 nt, synthetic construct
  source 1..20: mol_type = other RNA
ctggggtagcgtgagcaagg

SEQ ID NO: 13189 - RNA, 20 nt, synthetic construct
  source 1..20: mol_type = other RNA
tccttgctcacgctacccca

SEQ ID NO: 13190 - RNA, 20 nt, synthetic construct
  source 1..20: mol_type = other RNA
tcaccagtcatccttgctca

SEQ ID NO: 13191 - RNA, 20 nt, synthetic construct
  source 1..20: mol_type = other RNA
actgtggtcatcaccagtca

SEQ ID NO: 13192 - RNA, 20 nt, synthetic construct
  source 1..20: mol_type = other RNA
catttcttatttatttattt

SEQ ID NO: 13193 - RNA, 20 nt, synthetic construct
  source 1..20: mol_type = other RNA
cacttaaaggctatctggct

SEQ ID NO: 13194 - RNA, 20 nt, synthetic construct
  source 1..20: mol_type = other RNA
taccttaatgaaatgcagca

SEQ ID NO: 13195 - RNA, 20 nt, synthetic construct
  source 1..20: mol_type = other RNA
gctcccgcaaagcaaacatt

SEQ ID NO: 13196 - RNA, 20 nt, synthetic construct
  source 1..20: mol_type = other RNA
tcccaccaggtaatgtttgc

SEQ ID NO: 13197 - RNA, 20 nt, synthetic construct
  source 1..20: mol_type = other RNA
gctattctcatgtcacagtt

SEQ ID NO: 13198 - RNA, 20 nt, synthetic construct
  source 1..20: mol_type = other RNA
cagttaacactccatctgtt

SEQ ID NO: 13199 - RNA, 20 nt, synthetic construct
  source 1..20: mol_type = other RNA
atagatagacttcagggtgt

SEQ ID NO: 13200 - RNA, 20 nt, synthetic construct
  source 1..20: mol_type = other RNA
atctatagacttctaacagt

SEQ ID NO: 13201 - RNA, 20 nt, synthetic construct
  source 1..20: mol_type = other RNA
aagcctgtctgaaattttac

SEQ ID NO: 13202 - RNA, 20 nt, synthetic construct
  source 1..20: mol_type = other RNA
gaaattttacacaattttgt

SEQ ID NO: 13203 - RNA, 20 nt, synthetic construct
  source 1..20: mol_type = other RNA
tttccatcagtttttcaaag

SEQ ID NO: 13204 - RNA, 20 nt, synthetic construct
  source 1..20: mol_type = other RNA
ttcttccctacctgatttac

SEQ ID NO: 13205 - RNA, 20 nt, synthetic construct
  source 1..20: mol_type = other RNA
acagctgggggcggctctgc

SEQ ID NO: 13206 - RNA, 20 nt, synthetic construct
  source 1..20: mol_type = other RNA
tggaatactacaactctgaa

SEQ ID NO: 13207 - RNA, 20 nt, synthetic construct
  source 1..20: mol_type = other RNA
agcccagccagctacccatc

SEQ ID NO: 13208 - RNA, 20 nt, synthetic construct
  source 1..20: mol_type = other RNA
ggaccttggctgaacagaag

SEQ ID NO: 13209 - RNA, 20 nt, synthetic construct
  source 1..20: mol_type = other RNA
agacctccaggtccagccca

SEQ ID NO: 13210 - RNA, 20 nt, synthetic construct
  source 1..20: mol_type = other RNA
tctgttcagccaaggtccag

SEQ ID NO: 13211 - RNA, 20 nt, synthetic construct
  source 1..20: mol_type = other RNA
aaaagaaataattagtggaa

SEQ ID NO: 13212 - RNA, 20 nt, synthetic construct
  source 1..20: mol_type = other RNA
gaagggaaaccttacctgtt

SEQ ID NO: 13213 - RNA, 20 nt, synthetic construct
  source 1..20: mol_type = other RNA
ttgcttaaatatgccaggag

SEQ ID NO: 13214 - RNA, 20 nt, synthetic construct
  source 1..20: mol_type = other RNA
cctaaagctcctggcatatt

SEQ ID NO: 13215 - RNA, 20 nt, synthetic construct
  source 1..20: mol_type = other RNA
cacctggtgttactccacaa

SEQ ID NO: 13216 - RNA, 20 nt, synthetic construct
  source 1..20: mol_type = other RNA
tgaaggaggcacattttctt

SEQ ID NO: 13217 - RNA, 20 nt, synthetic construct
  source 1..20: mol_type = other RNA
aggggggatacctagtgatt

SEQ ID NO: 13218 - RNA, 20 nt, synthetic construct
  source 1..20: mol_type = other RNA
tctccactgtatcttcagtg

SEQ ID NO: 13219 - RNA, 20 nt, synthetic construct
  source 1..20: mol_type = other RNA
gaactcacaaaattaggtag

SEQ ID NO: 13220 - RNA, 20 nt, synthetic construct
  source 1..20: mol_type = other RNA
ttttagatgagttggagttt

SEQ ID NO: 13221 - RNA, 20 nt, synthetic construct
  source 1..20: mol_type = other RNA
gcttactaaactccaactca

SEQ ID NO: 13222 - RNA, 20 nt, synthetic construct
  source 1..20: mol_type = other RNA
ctttagagagtcaataagca

SEQ ID NO: 13223 - RNA, 20 nt, synthetic construct
  source 1..20: mol_type = other RNA
ataagcatttctctatcaga

SEQ ID NO: 13224 - RNA, 20 nt, synthetic construct
  source 1..20: mol_type = other RNA
gagtttgcattcatgccttg

SEQ ID NO: 13225 - RNA, 20 nt, synthetic construct
  source 1..20: mol_type = other RNA
tacagctagttagtggcata

SEQ ID NO: 13226 - RNA, 20 nt, synthetic construct
  source 1..20: mol_type = other RNA
atggatgcaaaaactaaggc

SEQ ID NO: 13227 - RNA, 20 nt, synthetic construct
  source 1..20: mol_type = other RNA
ctatcatgacaagacccagg

SEQ ID NO: 13228 - RNA, 20 nt, synthetic construct
  source 1..20: mol_type = other RNA
tgatagtgacaacaaccata

SEQ ID NO: 13229 - RNA, 20 nt, synthetic construct
  source 1..20: mol_type = other RNA
tgtcatgatagtgacaacaa

SEQ ID NO: 13230 - RNA, 20 nt, synthetic construct
  source 1..20: mol_type = other RNA
taacttatgtgtgtactgtt

SEQ ID NO: 13231 - RNA, 20 nt, synthetic construct
  source 1..20: mol_type = other RNA
tatatgattatccagtgtcc

SEQ ID NO: 13232 - RNA, 20 nt, synthetic construct
  source 1..20: mol_type = other RNA
tcatccaatacagcaaaacc

SEQ ID NO: 13233 - RNA, 20 nt, synthetic construct
  source 1..20: mol_type = other RNA
cccagaactaataacacagt

SEQ ID NO: 13234 - RNA, 20 nt, synthetic construct
  source 1..20: mol_type = other RNA
ggttcacgaaactaggagac

SEQ ID NO: 13235 - RNA, 20 nt, synthetic construct
  source 1..20: mol_type = other RNA
cctagtttcgtgaacctgac

SEQ ID NO: 13236 - RNA, 20 nt, synthetic construct
  source 1..20: mol_type = other RNA
tcattcatttgggagaggtg

SEQ ID NO: 13237 - RNA, 20 nt, synthetic construct
  source 1..20: mol_type = other RNA
aatgagaaacaagagacatt

SEQ ID NO: 13238 - RNA, 20 nt, synthetic construct
  source 1..20: mol_type = other RNA
cttgtttctcattcgactac

SEQ ID NO: 13239 - RNA, 20 nt, synthetic construct
  source 1..20: mol_type = other RNA
agcttggagagtaattatat

SEQ ID NO: 13240 - RNA, 20 nt, synthetic construct
  source 1..20: mol_type = other RNA
catcccaaaggaatgttggt

SEQ ID NO: 13241 - RNA, 20 nt, synthetic construct
  source 1..20: mol_type = other RNA
atggagttcagcacaagcac

SEQ ID NO: 13242 - RNA, 20 nt, synthetic construct
  source 1..20: mol_type = other RNA
tcagggaagataaagtggct

SEQ ID NO: 13243 - RNA, 20 nt, synthetic construct
  source 1..20: mol_type = other RNA
tcagaaataatatgaagagg

SEQ ID NO: 13244 - RNA, 20 nt, synthetic construct
  source 1..20: mol_type = other RNA
gaaataatatgaagaggaag

SEQ ID NO: 13245 - RNA, 20 nt, synthetic construct
  source 1..20: mol_type = other RNA
cttcctcttcatattatttc

SEQ ID NO: 13246 - RNA, 20 nt, synthetic construct
  source 1..20: mol_type = other RNA
agcactgagaaataattaaa

SEQ ID NO: 13247 - RNA, 20 nt, synthetic construct
  source 1..20: mol_type = other RNA
aggtacaaaaaaatcacagg

SEQ ID NO: 13248 - RNA, 20 nt, synthetic construct
  source 1..20: mol_type = other RNA
ctttatggattcactgtagg

SEQ ID NO: 13249 - RNA, 20 nt, synthetic construct
  source 1..20: mol_type = other RNA
ggccctgcctctaccactca

SEQ ID NO: 13250 - RNA, 20 nt, synthetic construct
  source 1..20: mol_type = other RNA
tcaaaatcacaaagtaggca

SEQ ID NO: 13251 - RNA, 20 nt, synthetic construct
  source 1..20: mol_type = other RNA
ctagcaattagtttaaattc

SEQ ID NO: 13252 - RNA, 20 nt, synthetic construct
  source 1..20: mol_type = other RNA
gtacttgtttttttaacact

SEQ ID NO: 13253 - RNA, 20 nt, synthetic construct
  source 1..20: mol_type = other RNA
aaaatctgtctcccttagca

SEQ ID NO: 13254 - RNA, 20 nt, synthetic construct
  source 1..20: mol_type = other RNA
cccttagcaggaaaggaaaa

SEQ ID NO: 13255 - RNA, 20 nt, synthetic construct
  source 1..20: mol_type = other RNA
tttcccctgtgtgtaaacac

SEQ ID NO: 13256 - RNA, 20 nt, synthetic construct
  source 1..20: mol_type = other RNA
aagccagagtcttttcccct

SEQ ID NO: 13257 - RNA, 20 nt, synthetic construct
  source 1..20: mol_type = other RNA
gaatccctgctccaccaatg

SEQ ID NO: 13258 - RNA, 20 nt, synthetic construct
  source 1..20: mol_type = other RNA
caaagctaatgcattggtgg

SEQ ID NO: 13259 - RNA, 20 nt, synthetic construct
  source 1..20: mol_type = other RNA
aaggtcacaaagctaatgca

SEQ ID NO: 13260 - RNA, 20 nt, synthetic construct
  source 1..20: mol_type = other RNA
ctttattgtggtatactttt

SEQ ID NO: 13261 - RNA, 20 nt, synthetic construct
  source 1..20: mol_type = other RNA
tatcaagtacataataagta

SEQ ID NO: 13262 - RNA, 20 nt, synthetic construct
  source 1..20: mol_type = other RNA
aaaaccaactctcctgtttg

SEQ ID NO: 13263 - RNA, 20 nt, synthetic construct
  source 1..20: mol_type = other RNA
caaactcctgggctcaagtg

SEQ ID NO: 13264 - RNA, 20 nt, synthetic construct
  source 1..20: mol_type = other RNA
cagctaccagggggctgagg

SEQ ID NO: 13265 - RNA, 20 nt, synthetic construct
  source 1..20: mol_type = other RNA
aggctgcagtgacccctgat

SEQ ID NO: 13266 - RNA, 20 nt, synthetic construct
  source 1..20: mol_type = other RNA
ctgcagcctagaccttctgg

SEQ ID NO: 13267 - RNA, 20 nt, synthetic construct
  source 1..20: mol_type = other RNA
cccagattggagcacagtgg

SEQ ID NO: 13268 - RNA, 20 nt, synthetic construct
  source 1..20: mol_type = other RNA
ccaggtttgctgtcacccag

SEQ ID NO: 13269 - RNA, 20 nt, synthetic construct
  source 1..20: mol_type = other RNA
cactctgtcaccaggtttgc

SEQ ID NO: 13270 - RNA, 20 nt, synthetic construct
  source 1..20: mol_type = other RNA
caaacagacaacaaacaaaa

SEQ ID NO: 13271 - RNA, 20 nt, synthetic construct
  source 1..20: mol_type = other RNA
gtttgagacaaggtctcact

SEQ ID NO: 13272 - RNA, 20 nt, synthetic construct
  source 1..20: mol_type = other RNA
gatgctgaaaacacagccag

SEQ ID NO: 13273 - RNA, 20 nt, synthetic construct
  source 1..20: mol_type = other RNA
tggtggtggttcttttaagt

SEQ ID NO: 13274 - RNA, 20 nt, synthetic construct
  source 1..20: mol_type = other RNA
tctacttcctctctggggct

SEQ ID NO: 13275 - RNA, 20 nt, synthetic construct
  source 1..20: mol_type = other RNA
gaatccacctttccctctta

SEQ ID NO: 13276 - RNA, 20 nt, synthetic construct
  source 1..20: mol_type = other RNA
taagagggaaaggtggattc

SEQ ID NO: 13277 - RNA, 20 nt, synthetic construct
  source 1..20: mol_type = other RNA
ctagttagtaatttccatgg

SEQ ID NO: 13278 - RNA, 20 nt, synthetic construct
  source 1..20: mol_type = other RNA
aataacccatggaaattact

SEQ ID NO: 13279 - RNA, 20 nt, synthetic construct
  source 1..20: mol_type = other RNA
ctatggtactactacttaga

SEQ ID NO: 13280 - RNA, 20 nt, synthetic construct
  source 1..20: mol_type = other RNA
aagtagtagtaccatagaga

SEQ ID NO: 13281 - RNA, 20 nt, synthetic construct
  source 1..20: mol_type = other RNA
ttacctgattgttttgccga

SEQ ID NO: 13282 - RNA, 20 nt, synthetic construct
  source 1..20: mol_type = other RNA
gcaaaacaatcaggtaagga

SEQ ID NO: 13283 - RNA, 20 nt, synthetic construct
  source 1..20: mol_type = other RNA
caagatattgagaataacaa

SEQ ID NO: 13284 - RNA, 20 nt, synthetic construct
  source 1..20: mol_type = other RNA
ggatagaaatataatttgtt

SEQ ID NO: 13285 - RNA, 20 nt, synthetic construct
  source 1..20: mol_type = other RNA
atatattttttaagaatatt

SEQ ID NO: 13286 - RNA, 20 nt, synthetic construct
  source 1..20: mol_type = other RNA
gcattaaaactaggggttaa

SEQ ID NO: 13287 - RNA, 20 nt, synthetic construct
  source 1..20: mol_type = other RNA
aaaaattttttagagtataa

SEQ ID NO: 13288 - RNA, 20 nt, synthetic construct
  source 1..20: mol_type = other RNA
cagaaaattgtaaaaactgt

SEQ ID NO: 13289 - RNA, 20 nt, synthetic construct
  source 1..20: mol_type = other RNA
ttgtccaacagagcaagtag

SEQ ID NO: 13290 - RNA, 20 nt, synthetic construct
  source 1..20: mol_type = other RNA
aacagagcaagtagtacctc

SEQ ID NO: 13291 - RNA, 20 nt, synthetic construct
  source 1..20: mol_type = other RNA
tacgttctttttcttcatgt

SEQ ID NO: 13292 - RNA, 20 nt, synthetic construct
  source 1..20: mol_type = other RNA
gtcttacgttctttttcttc

SEQ ID NO: 13293 - RNA, 20 nt, synthetic construct
  source 1..20: mol_type = other RNA
gatacaatccagtctcagat

SEQ ID NO: 13294 - RNA, 20 nt, synthetic construct
  source 1..20: mol_type = other RNA
cagattcagatggacttatg

SEQ ID NO: 13295 - RNA, 20 nt, synthetic construct
  source 1..20: mol_type = other RNA
atctgaatctgagactggat

SEQ ID NO: 13296 - RNA, 20 nt, synthetic construct
  source 1..20: mol_type = other RNA
agggcatcaattctaccgct

SEQ ID NO: 13297 - RNA, 20 nt, synthetic construct
  source 1..20: mol_type = other RNA
cattttctccagagccagta

SEQ ID NO: 13298 - RNA, 20 nt, synthetic construct
  source 1..20: mol_type = other RNA
cttaaaaaaaggtggggtgt

SEQ ID NO: 13299 - RNA, 20 nt, synthetic construct
  source 1..20: mol_type = other RNA
tccctaaacaccccaccttt

SEQ ID NO: 13300 - RNA, 20 nt, synthetic construct
  source 1..20: mol_type = other RNA
gtgttttttattctttgcat

SEQ ID NO: 13301 - RNA, 20 nt, synthetic construct
  source 1..20: mol_type = other RNA
ggctgttgctatccatttgc

SEQ ID NO: 13302 - RNA, 20 nt, synthetic construct
  source 1..20: mol_type = other RNA
ttctgtcaggctgttgctat

SEQ ID NO: 13303 - RNA, 20 nt, synthetic construct
  source 1..20: mol_type = other RNA
atatcaccgttgtcattctg

SEQ ID NO: 13304 - RNA, 20 nt, synthetic construct
  source 1..20: mol_type = other RNA
gcgggctctcaagtaagttc

SEQ ID NO: 13305 - RNA, 20 nt, synthetic construct
  source 1..20: mol_type = other RNA
taaccaaaatggtttctaaa

SEQ ID NO: 13306 - RNA, 20 nt, synthetic construct
  source 1..20: mol_type = other RNA
aaaaacagttggggtgggag

SEQ ID NO: 13307 - RNA, 20 nt, synthetic construct
  source 1..20: mol_type = other RNA
ctagaaattcatctgtgatc

SEQ ID NO: 13308 - RNA, 20 nt, synthetic construct
  source 1..20: mol_type = other RNA
taaatctagatcacagatga

SEQ ID NO: 13309 - RNA, 20 nt, synthetic construct
  source 1..20: mol_type = other RNA
cacccattataaatacagta

SEQ ID NO: 13310 - RNA, 20 nt, synthetic construct
  source 1..20: mol_type = other RNA
atttgcccccctccccccgt

SEQ ID NO: 13311 - RNA, 20 nt, synthetic construct
  source 1..20: mol_type = other RNA
gatgcccagctgatggattt

SEQ ID NO: 13312 - RNA, 20 nt, synthetic construct
  source 1..20: mol_type = other RNA
tgcctttagaggctggtggg

SEQ ID NO: 13313 - RNA, 20 nt, synthetic construct
  source 1..20: mol_type = other RNA
ggccgtagcatattacccac

SEQ ID NO: 13314 - RNA, 20 nt, synthetic construct
  source 1..20: mol_type = other RNA
gctgtttgaaacagcaatct

SEQ ID NO: 13315 - RNA, 20 nt, synthetic construct
  source 1..20: mol_type = other RNA
ttacaggtacagcagttact

SEQ ID NO: 13316 - RNA, 20 nt, synthetic construct
  source 1..20: mol_type = other RNA
gcgttgggattttctctcta

SEQ ID NO: 13317 - RNA, 20 nt, synthetic construct
  source 1..20: mol_type = other RNA
catttttaaaacgttattta

SEQ ID NO: 13318 - RNA, 20 nt, synthetic construct
  source 1..20: mol_type = other RNA
gtctcatttttaaaacgtta

SEQ ID NO: 13319 - RNA, 20 nt, synthetic construct
  source 1..20: mol_type = other RNA
agggttttctccagaatggt

SEQ ID NO: 13320 - RNA, 20 nt, synthetic construct
  source 1..20: mol_type = other RNA
gcaatttaaaatacttcaga

SEQ ID NO: 13321 - RNA, 20 nt, synthetic construct
  source 1..20: mol_type = other RNA
gaattctttagatcaatctg

SEQ ID NO: 13322 - RNA, 20 nt, synthetic construct
  source 1..20: mol_type = other RNA
tttttgcaactaaaaaataa

SEQ ID NO: 13323 - RNA, 20 nt, synthetic construct
  source 1..20: mol_type = other RNA
ttataaagaaagaaacaaac

SEQ ID NO: 13324 - RNA, 20 nt, synthetic construct
  source 1..20: mol_type = other RNA
gttgctgaatgaaatagatt

SEQ ID NO: 13325 - RNA, 20 nt, synthetic construct
  source 1..20: mol_type = other RNA
ctgaatacttgcctgagatg

SEQ ID NO: 13326 - RNA, 20 nt, synthetic construct
  source 1..20: mol_type = other RNA
ctccaaaatcatctcaggca

SEQ ID NO: 13327 - RNA, 20 nt, synthetic construct
  source 1..20: mol_type = other RNA
attttaaactctcttcactg

SEQ ID NO: 13328 - RNA, 20 nt, synthetic construct
  source 1..20: mol_type = other RNA
cttccagtgatttagagctg

SEQ ID NO: 13329 - RNA, 20 nt, synthetic construct
  source 1..20: mol_type = other RNA
tttaattaaaagaaatttgt

SEQ ID NO: 13330 - RNA, 20 nt, synthetic construct
  source 1..20: mol_type = other RNA
ttcagaactaataaaatatt

SEQ ID NO: 13331 - RNA, 20 nt, synthetic construct
  source 1..20: mol_type = other RNA
gtggttagttgaatatttta

SEQ ID NO: 13332 - RNA, 20 nt, synthetic construct
  source 1..20: mol_type = other RNA
cttttgtttgtgaaatttgc

SEQ ID NO: 13333 - RNA, 20 nt, synthetic construct
  source 1..20: mol_type = other RNA
ctatgcctatcctggcatag

SEQ ID NO: 13334 - RNA, 20 nt, synthetic construct
  source 1..20: mol_type = other RNA
ggcataggattaactaatta

SEQ ID NO: 13335 - RNA, 20 nt, synthetic construct
  source 1..20: mol_type = other RNA
tcggtttttatcttcagcac

SEQ ID NO: 13336 - RNA, 20 nt, synthetic construct
  source 1..20: mol_type = other RNA
atgtctgtaaagtttctaag

SEQ ID NO: 13337 - RNA, 20 nt, synthetic construct
  source 1..20: mol_type = other RNA
gtaaagtttctaaggcagag

SEQ ID NO: 13338 - RNA, 20 nt, synthetic construct
  source 1..20: mol_type = other RNA
ccaagccctgggccatggac

SEQ ID NO: 13339 - RNA, 20 nt, synthetic construct
  source 1..20: mol_type = other RNA
atggcccagggcttggggac

SEQ ID NO: 13340 - RNA, 20 nt, synthetic construct
  source 1..20: mol_type = other RNA
caggccggtactggtccatg

SEQ ID NO: 13341 - RNA, 20 nt, synthetic construct
  source 1..20: mol_type = other RNA
tccatgaaaccactccctgt

SEQ ID NO: 13342 - RNA, 20 nt, synthetic construct
  source 1..20: mol_type = other RNA
agagtaatgccttagaacaa

SEQ ID NO: 13343 - RNA, 20 nt, synthetic construct
  source 1..20: mol_type = other RNA
ttttaggtatttctcttttg

SEQ ID NO: 13344 - RNA, 20 nt, synthetic construct
  source 1..20: mol_type = other RNA
caacagattatcaaaacata

SEQ ID NO: 13345 - RNA, 20 nt, synthetic construct
  source 1..20: mol_type = other RNA
gtagataagtttgaaaaagg

SEQ ID NO: 13346 - RNA, 20 nt, synthetic construct
  source 1..20: mol_type = other RNA
aagagagggaaacatgaaag

SEQ ID NO: 13347 - RNA, 20 nt, synthetic construct
  source 1..20: mol_type = other RNA
tttcttaacctttttaaaaa

SEQ ID NO: 13348 - RNA, 20 nt, synthetic construct
  source 1..20: mol_type = other RNA
tcatttcttttatgaaatcc

SEQ ID NO: 13349 - RNA, 20 nt, synthetic construct
  source 1..20: mol_type = other RNA
aacaactgttttgagaggat

SEQ ID NO: 13350 - RNA, 20 nt, synthetic construct
  source 1..20: mol_type = other RNA
tgtgatattttattacaaat

SEQ ID NO: 13351 - RNA, 20 nt, synthetic construct
  source 1..20: mol_type = other RNA
ttgtggagattcctaatttg

SEQ ID NO: 13352 - RNA, 20 nt, synthetic construct
  source 1..20: mol_type = other RNA
atggatattggtctttgtgg

SEQ ID NO: 13353 - RNA, 20 nt, synthetic construct
  source 1..20: mol_type = other RNA
ttagcttcattgaatgctgt

SEQ ID NO: 13354 - RNA, 20 nt, synthetic construct
  source 1..20: mol_type = other RNA
aaggaaggttttctctctcc

SEQ ID NO: 13355 - RNA, 20 nt, synthetic construct
  source 1..20: mol_type = other RNA
ttcacatggcagtttacctg

SEQ ID NO: 13356 - RNA, 20 nt, synthetic construct
  source 1..20: mol_type = other RNA
ggactgagtagacagttctg

SEQ ID NO: 13357 - RNA, 20 nt, synthetic construct
  source 1..20: mol_type = other RNA
agactttatacactaattaa

SEQ ID NO: 13358 - RNA, 20 nt, synthetic construct
  source 1..20: mol_type = other RNA
actcagtccagactttatac

SEQ ID NO: 13359 - RNA, 20 nt, synthetic construct
  source 1..20: mol_type = other RNA
tgtgacactggcacatactt

SEQ ID NO: 13360 - RNA, 20 nt, synthetic construct
  source 1..20: mol_type = other RNA
caggacaaggatctaaattc

SEQ ID NO: 13361 - RNA, 20 nt, synthetic construct
  source 1..20: mol_type = other RNA
tttcttctcgccttttttaa

SEQ ID NO: 13362 - RNA, 20 nt, synthetic construct
  source 1..20: mol_type = other RNA
attcttaccaagctggttaa

SEQ ID NO: 13363 - RNA, 20 nt, synthetic construct
  source 1..20: mol_type = other RNA
ttgttcggcctatggggccg

SEQ ID NO: 13364 - RNA, 20 nt, synthetic construct
  source 1..20: mol_type = other RNA
tcccctcggccccataggcc

SEQ ID NO: 13365 - RNA, 20 nt, synthetic construct
  source 1..20: mol_type = other RNA
gctccatcttcaccagaaat

SEQ ID NO: 13366 - RNA, 20 nt, synthetic construct
  source 1..20: mol_type = other RNA
agtataaagtggctattttt

SEQ ID NO: 13367 - RNA, 20 nt, synthetic construct
  source 1..20: mol_type = other RNA
atcagttctcccaactaatt

SEQ ID NO: 13368 - RNA, 20 nt, synthetic construct
  source 1..20: mol_type = other RNA
tgtaagaacaaagtattgaa

SEQ ID NO: 13369 - RNA, 20 nt, synthetic construct
  source 1..20: mol_type = other RNA
tatttctcacatgaaaaagt

SEQ ID NO: 13370 - RNA, 20 nt, synthetic construct
  source 1..20: mol_type = other RNA
ggaaagtgtttactttttca

SEQ ID NO: 13371 - RNA, 20 nt, synthetic construct
  source 1..20: mol_type = other RNA
cttccatgtaatttgctgtg

SEQ ID NO: 13372 - RNA, 20 nt, synthetic construct
  source 1..20: mol_type = other RNA
gcgttgtacggcaggaagct

SEQ ID NO: 13373 - RNA, 20 nt, synthetic construct
  source 1..20: mol_type = other RNA
agtcagcgttgtacggcagg

SEQ ID NO: 13374 - RNA, 20 nt, synthetic construct
  source 1..20: mol_type = other RNA
gatcagaactccccagtatt

SEQ ID NO: 13375 - RNA, 20 nt, synthetic construct
  source 1..20: mol_type = other RNA
tgttataaagcaaacccata

SEQ ID NO: 13376 - RNA, 20 nt, synthetic construct
  source 1..20: mol_type = other RNA
tgacaatctaaaacaaaggg

SEQ ID NO: 13377 - RNA, 20 nt, synthetic construct
  source 1..20: mol_type = other RNA
agacaagaaaaacttttatt

SEQ ID NO: 13378 - RNA, 20 nt, synthetic construct
  source 1..20: mol_type = other RNA
ggatacttcagttgtgggcc

SEQ ID NO: 13379 - RNA, 20 nt, synthetic construct
  source 1..20: mol_type = other RNA
tctctaattagtcacacctc

SEQ ID NO: 13380 - RNA, 20 nt, synthetic construct
  source 1..20: mol_type = other RNA
cacctctacataagtgaaaa

SEQ ID NO: 13381 - RNA, 20 nt, synthetic construct
  source 1..20: mol_type = other RNA
atattctcctccaaagcatt

SEQ ID NO: 13382 - RNA, 20 nt, synthetic construct
  source 1..20: mol_type = other RNA
cgtcatttaggtcaaattct

SEQ ID NO: 13383 - RNA, 20 nt, synthetic construct
  source 1..20: mol_type = other RNA
tttaggtcaaattcttctat

SEQ ID NO: 13384 - RNA, 20 nt, synthetic construct
  source 1..20: mol_type = other RNA
aattcttctataactgtgtc

SEQ ID NO: 13385 - RNA, 20 nt, synthetic construct
  source 1..20: mol_type = other RNA
ttaaatttataccactttcc

SEQ ID NO: 13386 - RNA, 20 nt, synthetic construct
  source 1..20: mol_type = other RNA
gatctctgggttctagaggg

SEQ ID NO: 13387 - RNA, 20 nt, synthetic construct
  source 1..20: mol_type = other RNA
ttaatgaaggaatagtagtg

SEQ ID NO: 13388 - RNA, 20 nt, synthetic construct
  source 1..20: mol_type = other RNA
tcgtacacagtgggcaggca

SEQ ID NO: 13389 - RNA, 20 nt, synthetic construct
  source 1..20: mol_type = other RNA
gtgtcatcgtacacagtggg

SEQ ID NO: 13390 - RNA, 20 nt, synthetic construct
  source 1..20: mol_type = other RNA
ttttgcttctacatagtttc

SEQ ID NO: 13391 - RNA, 20 nt, synthetic construct
  source 1..20: mol_type = other RNA
gctttcccagtcaaacccaa

SEQ ID NO: 13392 - RNA, 20 nt, synthetic construct
  source 1..20: mol_type = other RNA
aacccaaatctcattaggtg

SEQ ID NO: 13393 - RNA, 20 nt, synthetic construct
  source 1..20: mol_type = other RNA
tggtaattcacctaatgaga

SEQ ID NO: 13394 - RNA, 20 nt, synthetic construct
  source 1..20: mol_type = other RNA
ttttcactgttattctctaa

SEQ ID NO: 13395 - RNA, 20 nt, synthetic construct
  source 1..20: mol_type = other RNA
aaagaaatttccaaactctg

SEQ ID NO: 13396 - RNA, 20 nt, synthetic construct
  source 1..20: mol_type = other RNA
gagtttggaaatttctttgg

SEQ ID NO: 13397 - RNA, 20 nt, synthetic construct
  source 1..20: mol_type = other RNA
ctcctagattgagagccatg

SEQ ID NO: 13398 - RNA, 20 nt, synthetic construct
  source 1..20: mol_type = other RNA
acagatctataagtatttag

SEQ ID NO: 13399 - RNA, 20 nt, synthetic construct
  source 1..20: mol_type = other RNA
cttaacaaatgcaaaattta

SEQ ID NO: 13400 - RNA, 20 nt, synthetic construct
  source 1..20: mol_type = other RNA
gtgatatcttcactcacctg

SEQ ID NO: 13401 - RNA, 20 nt, synthetic construct
  source 1..20: mol_type = other RNA
tcacaggtgagtgaagatat

SEQ ID NO: 13402 - RNA, 20 nt, synthetic construct
  source 1..20: mol_type = other RNA
ttacagatcttctgatcaga

SEQ ID NO: 13403 - RNA, 20 nt, synthetic construct
  source 1..20: mol_type = other RNA
ctccccattttctgttggaa

SEQ ID NO: 13404 - RNA, 20 nt, synthetic construct
  source 1..20: mol_type = other RNA
ttaaattgcaatgtgttaat

SEQ ID NO: 13405 - RNA, 20 nt, synthetic construct
  source 1..20: mol_type = other RNA
ttctggtagtatcagctgtg

SEQ ID NO: 13406 - RNA, 20 nt, synthetic construct
  source 1..20: mol_type = other RNA
cattgatcagatggatgaat

SEQ ID NO: 13407 - RNA, 20 nt, synthetic construct
  source 1..20: mol_type = other RNA
acatcctaatagtgaacctg

SEQ ID NO: 13408 - RNA, 20 nt, synthetic construct
  source 1..20: mol_type = other RNA
ttaaataaagaacacttttt

SEQ ID NO: 13409 - RNA, 20 nt, synthetic construct
  source 1..20: mol_type = other RNA
ggggaatgatatgaacaaat

SEQ ID NO: 13410 - RNA, 20 nt, synthetic construct
  source 1..20: mol_type = other RNA
ttcaattcctaggaatttgc

SEQ ID NO: 13411 - RNA, 20 nt, synthetic construct
  source 1..20: mol_type = other RNA
aaagagagactgcacttggt

SEQ ID NO: 13412 - RNA, 20 nt, synthetic construct
  source 1..20: mol_type = other RNA
ctctttggacatttaatgga

SEQ ID NO: 13413 - RNA, 20 nt, synthetic construct
  source 1..20: mol_type = other RNA
gtgtcatcatccactgaaag

SEQ ID NO: 13414 - RNA, 20 nt, synthetic construct
  source 1..20: mol_type = other RNA
tcatccactgaaagtaatga

SEQ ID NO: 13415 - RNA, 20 nt, synthetic construct
  source 1..20: mol_type = other RNA
ttactttcagtggatgatga

SEQ ID NO: 13416 - RNA, 20 nt, synthetic construct
  source 1..20: mol_type = other RNA
agtaataccaggttctctac

SEQ ID NO: 13417 - RNA, 20 nt, synthetic construct
  source 1..20: mol_type = other RNA
accatgagcactttacaata

SEQ ID NO: 13418 - RNA, 20 nt, synthetic construct
  source 1..20: mol_type = other RNA
gtaactttatggaatataat

SEQ ID NO: 13419 - RNA, 20 nt, synthetic construct
  source 1..20: mol_type = other RNA
agtccatctgtaatacaggc

SEQ ID NO: 13420 - RNA, 20 nt, synthetic construct
  source 1..20: mol_type = other RNA
atctgtaatacaggcagctt

SEQ ID NO: 13421 - RNA, 20 nt, synthetic construct
  source 1..20: mol_type = other RNA
ttacacatttcaggagctac

SEQ ID NO: 13422 - RNA, 20 nt, synthetic construct
  source 1..20: mol_type = other RNA
tgttttaggaaaccccaaaa

SEQ ID NO: 13423 - RNA, 20 nt, synthetic construct
  source 1..20: mol_type = other RNA
tccagcagctgtatatgcaa

SEQ ID NO: 13424 - RNA, 20 nt, synthetic construct
  source 1..20: mol_type = other RNA
agttcagggtttgtggggct

SEQ ID NO: 13425 - RNA, 20 nt, synthetic construct
  source 1..20: mol_type = other RNA
ggatccttcatggtaatcac

SEQ ID NO: 13426 - RNA, 20 nt, synthetic construct
  source 1..20: mol_type = other RNA
gatgttaatgaagagtaagt

SEQ ID NO: 13427 - RNA, 20 nt, synthetic construct
  source 1..20: mol_type = other RNA
tagaaataatcctgctgtaa

SEQ ID NO: 13428 - RNA, 20 nt, synthetic construct
  source 1..20: mol_type = other RNA
aaagcatagatttaaaaaaa

SEQ ID NO: 13429 - RNA, 20 nt, synthetic construct
  source 1..20: mol_type = other RNA
agaaaacctacatcaaactc

SEQ ID NO: 13430 - RNA, 20 nt, synthetic construct
  source 1..20: mol_type = other RNA
ggctggtgatgcatagaaag

SEQ ID NO: 13431 - RNA, 20 nt, synthetic construct
  source 1..20: mol_type = other RNA
ttgtgatgttggctgatagt

SEQ ID NO: 13432 - RNA, 20 nt, synthetic construct
  source 1..20: mol_type = other RNA
tttgtttctaggtgtagtac

SEQ ID NO: 13433 - RNA, 20 nt, synthetic construct
  source 1..20: mol_type = other RNA
atttcaacaatgaataatct

SEQ ID NO: 13434 - RNA, 20 nt, synthetic construct
  source 1..20: mol_type = other RNA
tcctaagaagatcttaggat

SEQ ID NO: 13435 - RNA, 20 nt, synthetic construct
  source 1..20: mol_type = other RNA
aaaagcctcataagccccct

SEQ ID NO: 13436 - RNA, 20 nt, synthetic construct
  source 1..20: mol_type = other RNA
tgctggtctaaaagcctcat

SEQ ID NO: 13437 - RNA, 20 nt, synthetic construct
  source 1..20: mol_type = other RNA
tcagtgcctggtgtcgtgct

SEQ ID NO: 13438 - RNA, 20 nt, synthetic construct
  source 1..20: mol_type = other RNA
tttgcttcttatctgaactt

SEQ ID NO: 13439 - RNA, 20 nt, synthetic construct
  source 1..20: mol_type = other RNA
tttgcaaccctgaagttcag

SEQ ID NO: 13440 - RNA, 20 nt, synthetic construct
  source 1..20: mol_type = other RNA
tttcccaccaaaaccttcaa

SEQ ID NO: 13441 - RNA, 20 nt, synthetic construct
  source 1..20: mol_type = other RNA
atttcaataaccactgaaat

SEQ ID NO: 13442 - RNA, 20 nt, synthetic construct
  source 1..20: mol_type = other RNA
acattacaaagagatctttc

SEQ ID NO: 13443 - RNA, 20 nt, synthetic construct
  source 1..20: mol_type = other RNA
gtgtatcctatattatccac

SEQ ID NO: 13444 - RNA, 20 nt, synthetic construct
  source 1..20: mol_type = other RNA
tccatctgtgagtctgtgta

SEQ ID NO: 13445 - RNA, 20 nt, synthetic construct
  source 1..20: mol_type = other RNA
caaaagattttgttaacttg

SEQ ID NO: 13446 - RNA, 20 nt, synthetic construct
  source 1..20: mol_type = other RNA
tgttgactgatggcggcact

SEQ ID NO: 13447 - RNA, 20 nt, synthetic construct
  source 1..20: mol_type = other RNA
acaggactttcatccaaagt

SEQ ID NO: 13448 - RNA, 20 nt, synthetic construct
  source 1..20: mol_type = other RNA
ttctccagctggcagtgccg

SEQ ID NO: 13449 - RNA, 20 nt, synthetic construct
  source 1..20: mol_type = other RNA
tctaacaatggtttaatgag

SEQ ID NO: 13450 - RNA, 20 nt, synthetic construct
  source 1..20: mol_type = other RNA
agctttcactttagaaacag

SEQ ID NO: 13451 - RNA, 20 nt, synthetic construct
  source 1..20: mol_type = other RNA
ttggcacttctgtttctaaa

SEQ ID NO: 13452 - RNA, 20 nt, synthetic construct
  source 1..20: mol_type = other RNA
tctgaatacaatttataata

SEQ ID NO: 13453 - RNA, 20 nt, synthetic construct
  source 1..20: mol_type = other RNA
tcttttaagggtgattctca

SEQ ID NO: 13454 - RNA, 20 nt, synthetic construct
  source 1..20: mol_type = other RNA
gtcttcttttaagggtgatt

SEQ ID NO: 13455 - RNA, 20 nt, synthetic construct
  source 1..20: mol_type = other RNA
ttaaacaacatagagaattt

SEQ ID NO: 13456 - RNA, 20 nt, synthetic construct
  source 1..20: mol_type = other RNA
gttattttagtggctaacaa

SEQ ID NO: 13457 - RNA, 20 nt, synthetic construct
  source 1..20: mol_type = other RNA
attttccatggaacacttgg

SEQ ID NO: 13458 - RNA, 20 nt, synthetic construct
  source 1..20: mol_type = other RNA
tgatgaggcgtaagtgccct

SEQ ID NO: 13459 - RNA, 20 nt, synthetic construct
  source 1..20: mol_type = other RNA
gcttcactggtctcacattc

SEQ ID NO: 13460 - RNA, 20 nt, synthetic construct
  source 1..20: mol_type = other RNA
cacattcagctgtacgatta

SEQ ID NO: 13461 - RNA, 20 nt, synthetic construct
  source 1..20: mol_type = other RNA
ggagttcgagaccagcctgg

SEQ ID NO: 13462 - RNA, 20 nt, synthetic construct
  source 1..20: mol_type = other RNA
ggagtacagtggcgtgatct

SEQ ID NO: 13463 - RNA, 20 nt, synthetic construct
  source 1..20: mol_type = other RNA
aaaacaggaggtggccaggc

SEQ ID NO: 13464 - RNA, 20 nt, synthetic construct
  source 1..20: mol_type = other RNA
gtcaaaaacaggaggtggcc

SEQ ID NO: 13465 - RNA, 20 nt, synthetic construct
  source 1..20: mol_type = other RNA
aaaagaaatttcatacaaag

SEQ ID NO: 13466 - RNA, 20 nt, synthetic construct
  source 1..20: mol_type = other RNA
tgacgttctttaccaattgc

SEQ ID NO: 13467 - RNA, 20 nt, synthetic construct
  source 1..20: mol_type = other RNA
agaccaggaggaaaaaaaat

SEQ ID NO: 13468 - RNA, 20 nt, synthetic construct
  source 1..20: mol_type = other RNA
ttctctccggtgtagtctgt

SEQ ID NO: 13469 - RNA, 20 nt, synthetic construct
  source 1..20: mol_type = other RNA
aaggctcatattttaattac

SEQ ID NO: 13470 - RNA, 20 nt, synthetic construct
  source 1..20: mol_type = other RNA
ttaatgaattgagaacattt

SEQ ID NO: 13471 - RNA, 20 nt, synthetic construct
  source 1..20: mol_type = other RNA
tttacttacttgtcagatca

SEQ ID NO: 13472 - RNA, 20 nt, synthetic construct
  source 1..20: mol_type = other RNA
gatcatctaataactggcat

SEQ ID NO: 13473 - RNA, 20 nt, synthetic construct
  source 1..20: mol_type = other RNA
aaaaaacagaaaggtttcag

SEQ ID NO: 13474 - RNA, 20 nt, synthetic construct
  source 1..20: mol_type = other RNA
ttttttataaccataattct

SEQ ID NO: 13475 - RNA, 20 nt, synthetic construct
  source 1..20: mol_type = other RNA
gaggattaaaagaaaaacat

SEQ ID NO: 13476 - RNA, 20 nt, synthetic construct
  source 1..20: mol_type = other RNA
aattcagcttaaatcttgat

SEQ ID NO: 13477 - RNA, 20 nt, synthetic construct
  source 1..20: mol_type = other RNA
aagaaagaagtcaagatttt

SEQ ID NO: 13478 - RNA, 20 nt, synthetic construct
  source 1..20: mol_type = other RNA
agaatggatcaaagaaacca

SEQ ID NO: 13479 - RNA, 20 nt, synthetic construct
  source 1..20: mol_type = other RNA
taatatattttctaattttc

SEQ ID NO: 13480 - RNA, 20 nt, synthetic construct
  source 1..20: mol_type = other RNA
ctatcttcttcagttctgct

SEQ ID NO: 13481 - RNA, 20 nt, synthetic construct
  source 1..20: mol_type = other RNA
attgtagatctttcctgctt

SEQ ID NO: 13482 - RNA, 20 nt, synthetic construct
  source 1..20: mol_type = other RNA
cagagattctggtacgttgt

SEQ ID NO: 13483 - RNA, 20 nt, synthetic construct
  source 1..20: mol_type = other RNA
ttgttctcattggtttcaaa

SEQ ID NO: 13484 - RNA, 20 nt, synthetic construct
  source 1..20: mol_type = other RNA
ttcaggagcaggttgttcag

SEQ ID NO: 13485 - RNA, 20 nt, synthetic construct
  source 1..20: mol_type = other RNA
attaggtctgcttggtccag

SEQ ID NO: 13486 - RNA, 20 nt, synthetic construct
  source 1..20: mol_type = other RNA
gcttggtccagagctgagtt

SEQ ID NO: 13487 - RNA, 20 nt, synthetic construct
  source 1..20: mol_type = other RNA
agagctgagttcaagtcctg

SEQ ID NO: 13488 - RNA, 20 nt, synthetic construct
  source 1..20: mol_type = other RNA
tgggagggtgtgtgtgtctg

SEQ ID NO: 13489 - RNA, 20 nt, synthetic construct
  source 1..20: mol_type = other RNA
aatccctgaatagaccaata

SEQ ID NO: 13490 - RNA, 20 nt, synthetic construct
  source 1..20: mol_type = other RNA
attcagggattcgacttctt

SEQ ID NO: 13491 - RNA, 20 nt, synthetic construct
  source 1..20: mol_type = other RNA
tgggccttttttggttggta

SEQ ID NO: 13492 - RNA, 20 nt, synthetic construct
  source 1..20: mol_type = other RNA
ctctttttctgttgcttgga

SEQ ID NO: 13493 - RNA, 20 nt, synthetic construct
  source 1..20: mol_type = other RNA
tcctatctgaatacccttta

SEQ ID NO: 13494 - RNA, 20 nt, synthetic construct
  source 1..20: mol_type = other RNA
aactgtctctgtttgcagat

SEQ ID NO: 13495 - RNA, 20 nt, synthetic construct
  source 1..20: mol_type = other RNA
ctgtttgcagatgacatgat

SEQ ID NO: 13496 - RNA, 20 nt, synthetic construct
  source 1..20: mol_type = other RNA
tctgcaaacagagacagttt

SEQ ID NO: 13497 - RNA, 20 nt, synthetic construct
  source 1..20: mol_type = other RNA
caggatacaaaatcaatgtg

SEQ ID NO: 13498 - RNA, 20 nt, synthetic construct
  source 1..20: mol_type = other RNA
attattcgtgtataggaatg

SEQ ID NO: 13499 - RNA, 20 nt, synthetic construct
  source 1..20: mol_type = other RNA
tccacatgccttgtaagttg

SEQ ID NO: 13500 - RNA, 20 nt, synthetic construct
  source 1..20: mol_type = other RNA
tctcttatttccttgagcag

SEQ ID NO: 13501 - RNA, 20 nt, synthetic construct
  source 1..20: mol_type = other RNA
gtggtagcttgatggggata

SEQ ID NO: 13502 - RNA, 20 nt, synthetic construct
  source 1..20: mol_type = other RNA
tggctatacaggttctgttt

SEQ ID NO: 13503 - RNA, 20 nt, synthetic construct
  source 1..20: mol_type = other RNA
ggtagcatgatgcctccagc

SEQ ID NO: 13504 - RNA, 20 nt, synthetic construct
  source 1..20: mol_type = other RNA
attgaatccttttcttgttt

SEQ ID NO: 13505 - RNA, 20 nt, synthetic construct
  source 1..20: mol_type = other RNA
acctaaaggtttgttggttt

SEQ ID NO: 13506 - RNA, 20 nt, synthetic construct
  source 1..20: mol_type = other RNA
agggcttttctttgttggga

SEQ ID NO: 13507 - RNA, 20 nt, synthetic construct
  source 1..20: mol_type = other RNA
tttagttctttttcttgcct

SEQ ID NO: 13508 - RNA, 20 nt, synthetic construct
  source 1..20: mol_type = other RNA
tctgttaacagataatttta

SEQ ID NO: 13509 - RNA, 20 nt, synthetic construct
  source 1..20: mol_type = other RNA
gcagtccggcctgggcgaca

SEQ ID NO: 13510 - RNA, 20 nt, synthetic construct
  source 1..20: mol_type = other RNA
ggcctgggcgacagagcgag

SEQ ID NO: 13511 - RNA, 20 nt, synthetic construct
  source 1..20: mol_type = other RNA
cccaggccggactgcggact

SEQ ID NO: 13512 - RNA, 20 nt, synthetic construct
  source 1..20: mol_type = other RNA
cgctctgtcgcccaggccgg

SEQ ID NO: 13513 - RNA, 20 nt, synthetic construct
  source 1..20: mol_type = other RNA
caaaaaaaaaaaaaaaaaaa

SEQ ID NO: 13514 - RNA, 20 nt, synthetic construct
  source 1..20: mol_type = other RNA
tttgtttccttaagttggtt

SEQ ID NO: 13515 - RNA, 20 nt, synthetic construct
  source 1..20: mol_type = other RNA
tctttaatttctttcagcaa

SEQ ID NO: 13516 - RNA, 20 nt, synthetic construct
  source 1..20: mol_type = other RNA
ttttattatgtcatctttaa

SEQ ID NO: 13517 - RNA, 20 nt, synthetic construct
  source 1..20: mol_type = other RNA
ttcaatccttgaacacaaga

SEQ ID NO: 13518 - RNA, 20 nt, synthetic construct
  source 1..20: mol_type = other RNA
caaagttttccctgttttct

SEQ ID NO: 13519 - RNA, 20 nt, synthetic construct
  source 1..20: mol_type = other RNA
tagccaggaaattatggcca

SEQ ID NO: 13520 - RNA, 20 nt, synthetic construct
  source 1..20: mol_type = other RNA
tgtgtatgtattttctcttt

SEQ ID NO: 13521 - RNA, 20 nt, synthetic construct
  source 1..20: mol_type = other RNA
atcaccaaactgggaaaata

SEQ ID NO: 13522 - RNA, 20 nt, synthetic construct
  source 1..20: mol_type = other RNA
aaagtcaatcaccaaactgg

SEQ ID NO: 13523 - RNA, 20 nt, synthetic construct
  source 1..20: mol_type = other RNA
atcagaggtaggtaataaaa

SEQ ID NO: 13524 - RNA, 20 nt, synthetic construct
  source 1..20: mol_type = other RNA
ccaactagtattatgagagg

SEQ ID NO: 13525 - RNA, 20 nt, synthetic construct
  source 1..20: mol_type = other RNA
gtctgactaagagtgtacag

SEQ ID NO: 13526 - RNA, 20 nt, synthetic construct
  source 1..20: mol_type = other RNA
gactaagagtgtacagctga

SEQ ID NO: 13527 - RNA, 20 nt, synthetic construct
  source 1..20: mol_type = other RNA
gacagacacatcagcgcatc

SEQ ID NO: 13528 - RNA, 20 nt, synthetic construct
  source 1..20: mol_type = other RNA
tttgctgctgatcatgtaat

SEQ ID NO: 13529 - RNA, 20 nt, synthetic construct
  source 1..20: mol_type = other RNA
gtcctttgctgctgatcatg

SEQ ID NO: 13530 - RNA, 20 nt, synthetic construct
  source 1..20: mol_type = other RNA
caacatgttgattcatgtct

SEQ ID NO: 13531 - RNA, 20 nt, synthetic construct
  source 1..20: mol_type = other RNA
tgttgttttgtgagctgtct

SEQ ID NO: 13532 - RNA, 20 nt, synthetic construct
  source 1..20: mol_type = other RNA
acccccttgtaaagatttgg

SEQ ID NO: 13533 - RNA, 20 nt, synthetic construct
  source 1..20: mol_type = other RNA
aagtaggaagcaatggcagc

SEQ ID NO: 13534 - RNA, 20 nt, synthetic construct
  source 1..20: mol_type = other RNA
cttcttgttacgtgcctaca

SEQ ID NO: 13535 - RNA, 20 nt, synthetic construct
  source 1..20: mol_type = other RNA
ttggtggatacagactgttg

SEQ ID NO: 13536 - RNA, 20 nt, synthetic construct
  source 1..20: mol_type = other RNA
gtatccaccaaagactcgct

SEQ ID NO: 13537 - RNA, 20 nt, synthetic construct
  source 1..20: mol_type = other RNA
aacacagattcccgcatgca

SEQ ID NO: 13538 - RNA, 20 nt, synthetic construct
  source 1..20: mol_type = other RNA
tcctgctcaatctctatttt

SEQ ID NO: 13539 - RNA, 20 nt, synthetic construct
  source 1..20: mol_type = other RNA
tgaaaccaatcattgtggca

SEQ ID NO: 13540 - RNA, 20 nt, synthetic construct
  source 1..20: mol_type = other RNA
cccatttttgtgactctggc

SEQ ID NO: 13541 - RNA, 20 nt, synthetic construct
  source 1..20: mol_type = other RNA
caaaaatgggagaccctctt

SEQ ID NO: 13542 - RNA, 20 nt, synthetic construct
  source 1..20: mol_type = other RNA
ctttttaatcagtacctgaa

SEQ ID NO: 13543 - RNA, 20 nt, synthetic construct
  source 1..20: mol_type = other RNA
gtttcgaattccagcaggac

SEQ ID NO: 13544 - RNA, 20 nt, synthetic construct
  source 1..20: mol_type = other RNA
tgctggaattcgaaacagac

SEQ ID NO: 13545 - RNA, 20 nt, synthetic construct
  source 1..20: mol_type = other RNA
tgcagccgcagcccatgaca

SEQ ID NO: 13546 - RNA, 20 nt, synthetic construct
  source 1..20: mol_type = other RNA
tgggctgcggctgcaggacg

SEQ ID NO: 13547 - RNA, 20 nt, synthetic construct
  source 1..20: mol_type = other RNA
aaagaatggaacaagtatta

SEQ ID NO: 13548 - RNA, 20 nt, synthetic construct
  source 1..20: mol_type = other RNA
ctcttattcagaatgtcctg

SEQ ID NO: 13549 - RNA, 20 nt, synthetic construct
  source 1..20: mol_type = other RNA
tgaatacacaaatcacttac

SEQ ID NO: 13550 - RNA, 20 nt, synthetic construct
  source 1..20: mol_type = other RNA
tctattagggttgaggaaat

SEQ ID NO: 13551 - RNA, 20 nt, synthetic construct
  source 1..20: mol_type = other RNA
gataggtcttctattagggt

SEQ ID NO: 13552 - RNA, 20 nt, synthetic construct
  source 1..20: mol_type = other RNA
gtgtctgataggtcttctat

SEQ ID NO: 13553 - RNA, 20 nt, synthetic construct
  source 1..20: mol_type = other RNA
gtaggatgacttttctgggg

SEQ ID NO: 13554 - RNA, 20 nt, synthetic construct
  source 1..20: mol_type = other RNA
tcctaccgacagttgtccgt

SEQ ID NO: 13555 - RNA, 20 nt, synthetic construct
  source 1..20: mol_type = other RNA
ttatgtggtaccccagaaaa

SEQ ID NO: 13556 - RNA, 20 nt, synthetic construct
  source 1..20: mol_type = other RNA
gcttgtctgccggctgacat

SEQ ID NO: 13557 - RNA, 20 nt, synthetic construct
  source 1..20: mol_type = other RNA
gccggctgacatttcggaat

SEQ ID NO: 13558 - RNA, 20 nt, synthetic construct
  source 1..20: mol_type = other RNA
gccggcagacaagcagacag

SEQ ID NO: 13559 - RNA, 20 nt, synthetic construct
  source 1..20: mol_type = other RNA
tcatctaataacgtgggcat

SEQ ID NO: 13560 - RNA, 20 nt, synthetic construct
  source 1..20: mol_type = other RNA
gacaagtaaaaatcttaaaa

SEQ ID NO: 13561 - RNA, 20 nt, synthetic construct
  source 1..20: mol_type = other RNA
gacaaacaatgcccacgtta

SEQ ID NO: 13562 - RNA, 20 nt, synthetic construct
  source 1..20: mol_type = other RNA
agctgtttctttttaagatt

SEQ ID NO: 13563 - RNA, 20 nt, synthetic construct
  source 1..20: mol_type = other RNA
attcatactatttaaaaaca

SEQ ID NO: 13564 - RNA, 20 nt, synthetic construct
  source 1..20: mol_type = other RNA
taccaggcaatacttgactt

SEQ ID NO: 13565 - RNA, 20 nt, synthetic construct
  source 1..20: mol_type = other RNA
acagcttgcaaggtatgtaa

SEQ ID NO: 13566 - RNA, 20 nt, synthetic construct
  source 1..20: mol_type = other RNA
acttctgatgggatggagtc

SEQ ID NO: 13567 - RNA, 20 nt, synthetic construct
  source 1..20: mol_type = other RNA
ctctgcatgacatttacaac

SEQ ID NO: 13568 - RNA, 20 nt, synthetic construct
  source 1..20: mol_type = other RNA
tgcagagagactccatccca

SEQ ID NO: 13569 - RNA, 20 nt, synthetic construct
  source 1..20: mol_type = other RNA
ttaatatcctgccttttttt

SEQ ID NO: 13570 - RNA, 20 nt, synthetic construct
  source 1..20: mol_type = other RNA
tcatcaattacttagtttct

SEQ ID NO: 13571 - RNA, 20 nt, synthetic construct
  source 1..20: mol_type = other RNA
tcacagtagcctgtaagacc

SEQ ID NO: 13572 - RNA, 20 nt, synthetic construct
  source 1..20: mol_type = other RNA
tacaggctactgtgaagact

SEQ ID NO: 13573 - RNA, 20 nt, synthetic construct
  source 1..20: mol_type = other RNA
cgctcccttatctccttcag

SEQ ID NO: 13574 - RNA, 20 nt, synthetic construct
  source 1..20: mol_type = other RNA
ttgctagatgtcaccccagc

SEQ ID NO: 13575 - RNA, 20 nt, synthetic construct
  source 1..20: mol_type = other RNA
ccccagcgaagcttttcctg

SEQ ID NO: 13576 - RNA, 20 nt, synthetic construct
  source 1..20: mol_type = other RNA
aaataaagacattgaacatt

SEQ ID NO: 13577 - RNA, 20 nt, synthetic construct
  source 1..20: mol_type = other RNA
ggcacagagaagctgggtag

SEQ ID NO: 13578 - RNA, 20 nt, synthetic construct
  source 1..20: mol_type = other RNA
tgggaacctcagttgcctgg

SEQ ID NO: 13579 - RNA, 20 nt, synthetic construct
  source 1..20: mol_type = other RNA
tcatgctctcactcaccctt

SEQ ID NO: 13580 - RNA, 20 nt, synthetic construct
  source 1..20: mol_type = other RNA
gtttgaaataaggtgaattt

SEQ ID NO: 13581 - RNA, 20 nt, synthetic construct
  source 1..20: mol_type = other RNA
catgtcagtttgaaataagg

SEQ ID NO: 13582 - RNA, 20 nt, synthetic construct
  source 1..20: mol_type = other RNA
tcatcagctgttggcatgag

SEQ ID NO: 13583 - RNA, 20 nt, synthetic construct
  source 1..20: mol_type = other RNA
ttatttttaaatcataactt

SEQ ID NO: 13584 - RNA, 20 nt, synthetic construct
  source 1..20: mol_type = other RNA
taaactagatgtagttcaag

SEQ ID NO: 13585 - RNA, 20 nt, synthetic construct
  source 1..20: mol_type = other RNA
tcaactatctaaattccatt

SEQ ID NO: 13586 - RNA, 20 nt, synthetic construct
  source 1..20: mol_type = other RNA
agcttgtcatcaactatcta

SEQ ID NO: 13587 - RNA, 20 nt, synthetic construct
  source 1..20: mol_type = other RNA
aacaatgggtctagcttgtc

SEQ ID NO: 13588 - RNA, 20 nt, synthetic construct
  source 1..20: mol_type = other RNA
aaaaataaaatatatgcagt

SEQ ID NO: 13589 - RNA, 20 nt, synthetic construct
  source 1..20: mol_type = other RNA
atataaataaggacatactt

SEQ ID NO: 13590 - RNA, 20 nt, synthetic construct
  source 1..20: mol_type = other RNA
ttatttatatggacatttaa

SEQ ID NO: 13591 - RNA, 20 nt, synthetic construct
  source 1..20: mol_type = other RNA
aaaaagaaaaaatatttagc

SEQ ID NO: 13592 - RNA, 20 nt, synthetic construct
  source 1..20: mol_type = other RNA
tttcacaggaatgattaagg

SEQ ID NO: 13593 - RNA, 20 nt, synthetic construct
  source 1..20: mol_type = other RNA
tcacaccttgaagcagtaag

SEQ ID NO: 13594 - RNA, 20 nt, synthetic construct
  source 1..20: mol_type = other RNA
taggaagttatatccaggca

SEQ ID NO: 13595 - RNA, 20 nt, synthetic construct
  source 1..20: mol_type = other RNA
gaagaaaataaagccctgaa

SEQ ID NO: 13596 - RNA, 20 nt, synthetic construct
  source 1..20: mol_type = other RNA
atttggatttatcgattcat

SEQ ID NO: 13597 - RNA, 20 nt, synthetic construct
  source 1..20: mol_type = other RNA
aaatgaaatggaaagaaatt

SEQ ID NO: 13598 - RNA, 20 nt, synthetic construct
  source 1..20: mol_type = other RNA
accttcagagtgctctacaa

SEQ ID NO: 13599 - RNA, 20 nt, synthetic construct
  source 1..20: mol_type = other RNA
gtttcgatcttttgccccgg

SEQ ID NO: 13600 - RNA, 20 nt, synthetic construct
  source 1..20: mol_type = other RNA
tcaaagcaacagcaccagcc

SEQ ID NO: 13601 - RNA, 20 nt, synthetic construct
  source 1..20: mol_type = other RNA
tcaaaatctccatccctgtc

SEQ ID NO: 13602 - RNA, 20 nt, synthetic construct
  source 1..20: mol_type = other RNA
gaatcaagttctcagtcctc

SEQ ID NO: 13603 - RNA, 20 nt, synthetic construct
  source 1..20: mol_type = other RNA
ttctcattctcttaaactta

SEQ ID NO: 13604 - RNA, 20 nt, synthetic construct
  source 1..20: mol_type = other RNA
taatattctttccctcttta

SEQ ID NO: 13605 - RNA, 20 nt, synthetic construct
  source 1..20: mol_type = other RNA
tatctataatattgtttaat

SEQ ID NO: 13606 - RNA, 20 nt, synthetic construct
  source 1..20: mol_type = other RNA
caactgaatcacaactagag

SEQ ID NO: 13607 - RNA, 20 nt, synthetic construct
  source 1..20: mol_type = other RNA
gatctgggacaagtaacttc

SEQ ID NO: 13608 - RNA, 20 nt, synthetic construct
  source 1..20: mol_type = other RNA
cagctactcaggaggctgag

SEQ ID NO: 13609 - RNA, 20 nt, synthetic construct
  source 1..20: mol_type = other RNA
aatacgttacatacgagagc

SEQ ID NO: 13610 - RNA, 20 nt, synthetic construct
  source 1..20: mol_type = other RNA
ttagctcagtggtgcctact

SEQ ID NO: 13611 - RNA, 20 nt, synthetic construct
  source 1..20: mol_type = other RNA
tatctgaatctcttttatgc

SEQ ID NO: 13612 - RNA, 20 nt, synthetic construct
  source 1..20: mol_type = other RNA
gatttcttattccttataac

SEQ ID NO: 13613 - RNA, 20 nt, synthetic construct
  source 1..20: mol_type = other RNA
cacatttatcctgaatttat

SEQ ID NO: 13614 - RNA, 20 nt, synthetic construct
  source 1..20: mol_type = other RNA
cacaaagtcttacatttgga

SEQ ID NO: 13615 - RNA, 20 nt, synthetic construct
  source 1..20: mol_type = other RNA
tacatttggaattaaagaaa

SEQ ID NO: 13616 - RNA, 20 nt, synthetic construct
  source 1..20: mol_type = other RNA
agaaagcaagctaatgtaaa

SEQ ID NO: 13617 - RNA, 20 nt, synthetic construct
  source 1..20: mol_type = other RNA
tacgcagctttgtacacctg

SEQ ID NO: 13618 - RNA, 20 nt, synthetic construct
  source 1..20: mol_type = other RNA
aggacgcagcagtgaacaaa

SEQ ID NO: 13619 - RNA, 20 nt, synthetic construct
  source 1..20: mol_type = other RNA
tcgacacctaaaacagtgcc

SEQ ID NO: 13620 - RNA, 20 nt, synthetic construct
  source 1..20: mol_type = other RNA
actaggcaccccaatcctaa

SEQ ID NO: 13621 - RNA, 20 nt, synthetic construct
  source 1..20: mol_type = other RNA
gaactcgtttccagcttttc

SEQ ID NO: 13622 - RNA, 20 nt, synthetic construct
  source 1..20: mol_type = other RNA
cactgccagaagtcttcact

SEQ ID NO: 13623 - RNA, 20 nt, synthetic construct
  source 1..20: mol_type = other RNA
tcactgtaaggatttgttca

SEQ ID NO: 13624 - RNA, 20 nt, synthetic construct
  source 1..20: mol_type = other RNA
gctgcaaaaagtggtttctt

SEQ ID NO: 13625 - RNA, 20 nt, synthetic construct
  source 1..20: mol_type = other RNA
ggtggaaaatagccaagcag

SEQ ID NO: 13626 - RNA, 20 nt, synthetic construct
  source 1..20: mol_type = other RNA
agcggtggttaagtattgta

SEQ ID NO: 13627 - RNA, 20 nt, synthetic construct
  source 1..20: mol_type = other RNA
ttattctacatttgtttacc

SEQ ID NO: 13628 - RNA, 20 nt, synthetic construct
  source 1..20: mol_type = other RNA
tattattttcataaagcagt

SEQ ID NO: 13629 - RNA, 20 nt, synthetic construct
  source 1..20: mol_type = other RNA
aggtaggtttacattaagaa

SEQ ID NO: 13630 - RNA, 20 nt, synthetic construct
  source 1..20: mol_type = other RNA
accaaagataccttcactgt

SEQ ID NO: 13631 - RNA, 20 nt, synthetic construct
  source 1..20: mol_type = other RNA
atgaaatgaggcaccatgag

SEQ ID NO: 13632 - RNA, 20 nt, synthetic construct
  source 1..20: mol_type = other RNA
agtcagatggacagcaccac

SEQ ID NO: 13633 - RNA, 20 nt, synthetic construct
  source 1..20: mol_type = other RNA
gatggacagcaccactgata

SEQ ID NO: 13634 - RNA, 20 nt, synthetic construct
  source 1..20: mol_type = other RNA
atctgacttgacttattcgt

SEQ ID NO: 13635 - RNA, 20 nt, synthetic construct
  source 1..20: mol_type = other RNA
agcctaagcaacatacatct

SEQ ID NO: 13636 - RNA, 20 nt, synthetic construct
  source 1..20: mol_type = other RNA
gactttatcttataactaaa

SEQ ID NO: 13637 - RNA, 20 nt, synthetic construct
  source 1..20: mol_type = other RNA
gactcactcatttcattctt

SEQ ID NO: 13638 - RNA, 20 nt, synthetic construct
  source 1..20: mol_type = other RNA
gatttcatgtgttcacagaa

SEQ ID NO: 13639 - RNA, 20 nt, synthetic construct
  source 1..20: mol_type = other RNA
tctaattctcaggcagttca

SEQ ID NO: 13640 - RNA, 20 nt, synthetic construct
  source 1..20: mol_type = other RNA
tacttactgatttgcatttg

SEQ ID NO: 13641 - RNA, 20 nt, synthetic construct
  source 1..20: mol_type = other RNA
atgggcaagaactagaactt

SEQ ID NO: 13642 - RNA, 20 nt, synthetic construct
  source 1..20: mol_type = other RNA
gaatttcaagttctagttct

SEQ ID NO: 13643 - RNA, 20 nt, synthetic construct
  source 1..20: mol_type = other RNA
aatttgaaccagaacattgt

SEQ ID NO: 13644 - RNA, 20 nt, synthetic construct
  source 1..20: mol_type = other RNA
accaaatatgaaatgattcc

SEQ ID NO: 13645 - RNA, 20 nt, synthetic construct
  source 1..20: mol_type = other RNA
gagaaagctgagtttattgg

SEQ ID NO: 13646 - RNA, 20 nt, synthetic construct
  source 1..20: mol_type = other RNA
tttcttccattcttcttttt

SEQ ID NO: 13647 - RNA, 20 nt, synthetic construct
  source 1..20: mol_type = other RNA
ttctctactctagaatggct

SEQ ID NO: 13648 - RNA, 20 nt, synthetic construct
  source 1..20: mol_type = other RNA
ttctcagagcactcgccagt

SEQ ID NO: 13649 - RNA, 20 nt, synthetic construct
  source 1..20: mol_type = other RNA
caatcacattgctgtttttt

SEQ ID NO: 13650 - RNA, 20 nt, synthetic construct
  source 1..20: mol_type = other RNA
gtttaaagttttcacacaaa

SEQ ID NO: 13651 - RNA, 20 nt, synthetic construct
  source 1..20: mol_type = other RNA
ctaaaatattattcaaataa

SEQ ID NO: 13652 - RNA, 20 nt, synthetic construct
  source 1..20: mol_type = other RNA
ctaatcatatgcaagcataa

SEQ ID NO: 13653 - RNA, 20 nt, synthetic construct
  source 1..20: mol_type = other RNA
aactcagggcattaataggg

SEQ ID NO: 13654 - RNA, 20 nt, synthetic construct
  source 1..20: mol_type = other RNA
tcttgttttagtttttattt

SEQ ID NO: 13655 - RNA, 20 nt, synthetic construct
  source 1..20: mol_type = other RNA
ctatccttctacctggtgga

SEQ ID NO: 13656 - RNA, 20 nt, synthetic construct
  source 1..20: mol_type = other RNA
tggtgatgacctacacacag

SEQ ID NO: 13657 - RNA, 20 nt, synthetic construct
  source 1..20: mol_type = other RNA
tcaccaggaccacccgagta

SEQ ID NO: 13658 - RNA, 20 nt, synthetic construct
  source 1..20: mol_type = other RNA
ccttataggtaagtgatcag

SEQ ID NO: 13659 - RNA, 20 nt, synthetic construct
  source 1..20: mol_type = other RNA
cagcatgtgttagagtgggg

SEQ ID NO: 13660 - RNA, 20 nt, synthetic construct
  source 1..20: mol_type = other RNA
ttctctatcagggtttctca

SEQ ID NO: 13661 - RNA, 20 nt, synthetic construct
  source 1..20: mol_type = other RNA
aggttgagaaaccctgatag

SEQ ID NO: 13662 - RNA, 20 nt, synthetic construct
  source 1..20: mol_type = other RNA
ctagagtccaggttgagaaa

SEQ ID NO: 13663 - RNA, 20 nt, synthetic construct
  source 1..20: mol_type = other RNA
agaatgtcactagagtccag

SEQ ID NO: 13664 - RNA, 20 nt, synthetic construct
  source 1..20: mol_type = other RNA
catgtaagtgttaacatata

SEQ ID NO: 13665 - RNA, 20 nt, synthetic construct
  source 1..20: mol_type = other RNA
ttataaaaaaaattcaagta

SEQ ID NO: 13666 - RNA, 20 nt, synthetic construct
  source 1..20: mol_type = other RNA
caattagggaaataccgtac

SEQ ID NO: 13667 - RNA, 20 nt, synthetic construct
  source 1..20: mol_type = other RNA
tgctggaaataaaagagata

SEQ ID NO: 13668 - RNA, 20 nt, synthetic construct
  source 1..20: mol_type = other RNA
attagaagcctgctgtgtaa

SEQ ID NO: 13669 - RNA, 20 nt, synthetic construct
  source 1..20: mol_type = other RNA
ttgtccattagaagcctgct

SEQ ID NO: 13670 - RNA, 20 nt, synthetic construct
  source 1..20: mol_type = other RNA
tgctgtggcctttaataaca

SEQ ID NO: 13671 - RNA, 20 nt, synthetic construct
  source 1..20: mol_type = other RNA
ttgacatttagttgtaatca

SEQ ID NO: 13672 - RNA, 20 nt, synthetic construct
  source 1..20: mol_type = other RNA
aggactaattgtaatttcca

SEQ ID NO: 13673 - RNA, 20 nt, synthetic construct
  source 1..20: mol_type = other RNA
tgaataatgattacaactaa

SEQ ID NO: 13674 - RNA, 20 nt, synthetic construct
  source 1..20: mol_type = other RNA
tgccaaggatcacagcttat

SEQ ID NO: 13675 - RNA, 20 nt, synthetic construct
  source 1..20: mol_type = other RNA
acacctcttcagttcaatat

SEQ ID NO: 13676 - RNA, 20 nt, synthetic construct
  source 1..20: mol_type = other RNA
tttcaatcgatgatcacaaa

SEQ ID NO: 13677 - RNA, 20 nt, synthetic construct
  source 1..20: mol_type = other RNA
gttttgcaaagtgccacgct

SEQ ID NO: 13678 - RNA, 20 nt, synthetic construct
  source 1..20: mol_type = other RNA
gaacaatctgacttctagat

SEQ ID NO: 13679 - RNA, 20 nt, synthetic construct
  source 1..20: mol_type = other RNA
gattgttctgacatataatt

SEQ ID NO: 13680 - RNA, 20 nt, synthetic construct
  source 1..20: mol_type = other RNA
ttttaaaatttcttagtaca

SEQ ID NO: 13681 - RNA, 20 nt, synthetic construct
  source 1..20: mol_type = other RNA
tatgaaatcactatgaatgg

SEQ ID NO: 13682 - RNA, 20 nt, synthetic construct
  source 1..20: mol_type = other RNA
ttttgtaaaccattcaaaac

SEQ ID NO: 13683 - RNA, 20 nt, synthetic construct
  source 1..20: mol_type = other RNA
tattccacagatgtgttttg

SEQ ID NO: 13684 - RNA, 20 nt, synthetic construct
  source 1..20: mol_type = other RNA
aaataccactcaaagctaaa

SEQ ID NO: 13685 - RNA, 20 nt, synthetic construct
  source 1..20: mol_type = other RNA
tgtaactggccaggatgttt

SEQ ID NO: 13686 - RNA, 20 nt, synthetic construct
  source 1..20: mol_type = other RNA
agccacttaagcctccaggc

SEQ ID NO: 13687 - RNA, 20 nt, synthetic construct
  source 1..20: mol_type = other RNA
tcggcttgcagctgctgtgg

SEQ ID NO: 13688 - RNA, 20 nt, synthetic construct
  source 1..20: mol_type = other RNA
tgaataatgctcttggcgaa

SEQ ID NO: 13689 - RNA, 20 nt, synthetic construct
  source 1..20: mol_type = other RNA
tgcttttgataggtttgttt

SEQ ID NO: 13690 - RNA, 20 nt, synthetic construct
  source 1..20: mol_type = other RNA
gctccatgaaattactcgct

SEQ ID NO: 13691 - RNA, 20 nt, synthetic construct
  source 1..20: mol_type = other RNA
tctcagcttaataatcccca

SEQ ID NO: 13692 - RNA, 20 nt, synthetic construct
  source 1..20: mol_type = other RNA
atcaggtttactgttacaca

SEQ ID NO: 13693 - RNA, 20 nt, synthetic construct
  source 1..20: mol_type = other RNA
atataaagagtaaaataata

SEQ ID NO: 13694 - RNA, 20 nt, synthetic construct
  source 1..20: mol_type = other RNA
tcaacttcttattctgcatg

SEQ ID NO: 13695 - RNA, 20 nt, synthetic construct
  source 1..20: mol_type = other RNA
cttcacatccactcctgttt

SEQ ID NO: 13696 - RNA, 20 nt, synthetic construct
  source 1..20: mol_type = other RNA
gttttttgctgatgtacccc

SEQ ID NO: 13697 - RNA, 20 nt, synthetic construct
  source 1..20: mol_type = other RNA
tgttgacacaaaataaactg

SEQ ID NO: 13698 - RNA, 20 nt, synthetic construct
  source 1..20: mol_type = other RNA
acatgacttagcagcctgtg

SEQ ID NO: 13699 - RNA, 20 nt, synthetic construct
  source 1..20: mol_type = other RNA
tataatcatagaaagcaata

SEQ ID NO: 13700 - RNA, 20 nt, synthetic construct
  source 1..20: mol_type = other RNA
tgatcatatcattggtatcc

SEQ ID NO: 13701 - RNA, 20 nt, synthetic construct
  source 1..20: mol_type = other RNA
aaatattaaagaaaatattc

SEQ ID NO: 13702 - RNA, 20 nt, synthetic construct
  source 1..20: mol_type = other RNA
gtaataataaaaatagaatt

SEQ ID NO: 13703 - RNA, 20 nt, synthetic construct
  source 1..20: mol_type = other RNA
tataccagtttcagaaataa

SEQ ID NO: 13704 - RNA, 20 nt, synthetic construct
  source 1..20: mol_type = other RNA
tagtacagatctaaaaagtc

SEQ ID NO: 13705 - RNA, 20 nt, synthetic construct
  source 1..20: mol_type = other RNA
tgtttaaactgaaattctta

SEQ ID NO: 13706 - RNA, 20 nt, synthetic construct
  source 1..20: mol_type = other RNA
ttgtagagaaacatctcact

SEQ ID NO: 13707 - RNA, 20 nt, synthetic construct
  source 1..20: mol_type = other RNA
tagaatctaggaaatacagt

SEQ ID NO: 13708 - RNA, 20 nt, synthetic construct
  source 1..20: mol_type = other RNA
atttcagatatgttaaaata

SEQ ID NO: 13709 - RNA, 20 nt, synthetic construct
  source 1..20: mol_type = other RNA
aaagtgtcaatttcagatat

SEQ ID NO: 13710 - RNA, 20 nt, synthetic construct
  source 1..20: mol_type = other RNA
aaagaaactcaccagccact

SEQ ID NO: 13711 - RNA, 20 nt, synthetic construct
  source 1..20: mol_type = other RNA
cacactaaagcattttccga

SEQ ID NO: 13712 - RNA, 20 nt, synthetic construct
  source 1..20: mol_type = other RNA
ggagaagctggcatgacaga

SEQ ID NO: 13713 - RNA, 20 nt, synthetic construct
  source 1..20: mol_type = other RNA
tgccagcttctcctgacttc

SEQ ID NO: 13714 - RNA, 20 nt, synthetic construct
  source 1..20: mol_type = other RNA
gtcatgccagcttctcctga

SEQ ID NO: 13715 - RNA, 20 nt, synthetic construct
  source 1..20: mol_type = other RNA
ctctgtcctaagctgcacct

SEQ ID NO: 13716 - RNA, 20 nt, synthetic construct
  source 1..20: mol_type = other RNA
taagctgcaccttatttcaa

SEQ ID NO: 13717 - RNA, 20 nt, synthetic construct
  source 1..20: mol_type = other RNA
actacttgtgagactagcta

SEQ ID NO: 13718 - RNA, 20 nt, synthetic construct
  source 1..20: mol_type = other RNA
cacaagtagttgacctttaa

SEQ ID NO: 13719 - RNA, 20 nt, synthetic construct
  source 1..20: mol_type = other RNA
agctagtctcacaagtagtt

SEQ ID NO: 13720 - RNA, 20 nt, synthetic construct
  source 1..20: mol_type = other RNA
ttttgcaacttttatagtgt

SEQ ID NO: 13721 - RNA, 20 nt, synthetic construct
  source 1..20: mol_type = other RNA
caattttgtaatccttttgg

SEQ ID NO: 13722 - RNA, 20 nt, synthetic construct
  source 1..20: mol_type = other RNA
attatggtaacaatattttt

SEQ ID NO: 13723 - RNA, 20 nt, synthetic construct
  source 1..20: mol_type = other RNA
ataaaactaaaatttaagaa

SEQ ID NO: 13724 - RNA, 20 nt, synthetic construct
  source 1..20: mol_type = other RNA
tagataagatgaaataaaca

SEQ ID NO: 13725 - RNA, 20 nt, synthetic construct
  source 1..20: mol_type = other RNA
ccacgtcatagataagatga

SEQ ID NO: 13726 - RNA, 20 nt, synthetic construct
  source 1..20: mol_type = other RNA
cagagtggagatttcataag

SEQ ID NO: 13727 - RNA, 20 nt, synthetic construct
  source 1..20: mol_type = other RNA
tacttatgaaatctccactc

SEQ ID NO: 13728 - RNA, 20 nt, synthetic construct
  source 1..20: mol_type = other RNA
aaattggactcaacattaga

SEQ ID NO: 13729 - RNA, 20 nt, synthetic construct
  source 1..20: mol_type = other RNA
aatttagacatcccatcagg

SEQ ID NO: 13730 - RNA, 20 nt, synthetic construct
  source 1..20: mol_type = other RNA
gttggtttagcctgcaaacc

SEQ ID NO: 13731 - RNA, 20 nt, synthetic construct
  source 1..20: mol_type = other RNA
agcaggtcgcctctcatctt

SEQ ID NO: 13732 - RNA, 20 nt, synthetic construct
  source 1..20: mol_type = other RNA
catcttcaccaggaagccag

SEQ ID NO: 13733 - RNA, 20 nt, synthetic construct
  source 1..20: mol_type = other RNA
cctctcatcttcaccaggaa

SEQ ID NO: 13734 - RNA, 20 nt, synthetic construct
  source 1..20: mol_type = other RNA
tggtgaagatgagaggcgac

SEQ ID NO: 13735 - RNA, 20 nt, synthetic construct
  source 1..20: mol_type = other RNA
gtggaggcgggtcccgtcct

SEQ ID NO: 13736 - RNA, 20 nt, synthetic construct
  source 1..20: mol_type = other RNA
agccactgcagcacctgctt

SEQ ID NO: 13737 - RNA, 20 nt, synthetic construct
  source 1..20: mol_type = other RNA
ttggtgcctccagccactgc

SEQ ID NO: 13738 - RNA, 20 nt, synthetic construct
  source 1..20: mol_type = other RNA
agctactgcagcacctgctt

SEQ ID NO: 13739 - RNA, 20 nt, synthetic construct
  source 1..20: mol_type = other RNA
ttggtgcctccagctactgc

SEQ ID NO: 13740 - RNA, 2931 nt, synthetic construct
  source 1..2931: mol_type = other RNA
caggagatcaagcggattaataaaattcggagaagactggtgaaggattctaacacaaagaaggctggcaagacaggccctatgaagacactgctggtgagagtgatgacacccgacctgagagaaagactggaaaacctgagaaagaagcctgagaatatcccccagcccatcagcaacacaagccgggccaacctgaataagctgctgaccgactacaccgaaatgaagaaggccatcctgcacgtgtattgggaagagttccagaaagacccagtcggcctgatgagcagagtggctcagcctgccagcaagaagatcgatcagaacaagctgaagcccgaaatggacgagaaggggaacctgacaaccgccggctttgcctgtagccagtgcggccagcccctgtttgtgtacaaactggaacaggtgagcgaaaagggcaaggcttacacgaattacttcggcagatgcaacgtggccgagcacgagaagctgatcctgctggcccagctgaagcctgagaaggatagcgatgaggcagtgacatattccctgggcaagttcggacagcgggccctggatttttattccattcatgtgaccaaggaatccacccaccccgtcaagcctcttgcccaaattgccggcaacagatacgccagcggccccgtgggcaaggccctgagcgacgcctgtatgggcaccatcgccagcttcctgtctaagtaccaggacattatcatcgagcaccagaaggtggtgaagggcaaccagaagagactggagagcctgcgcgagctggccggcaaggaaaacctggagtatcctagcgtgaccctgcctcctcagcctcatacaaaggagggcgtggatgcctacaacgaagtgatcgcccgggtgcggatgtgggtgaacctgaatctgtggcagaagctgaagctgtctagagacgacgccaagcccctgctgagactgaagggcttccccagcttccctctggtggagagacaggcaaatgaagtggactggtgggacatggtgtgtaacgtgaagaagctgatcaatgagaagaaggaggacggcaaagtgttctggcagaatctggccggctacaagcgtcaggaggccctgcggccctacctgagcagcgaggaagacagaaagaagggcaagaagttcgcccggtatcagctgggggacctgctgctgcacctcgagaagaagcacggcgaagactgggggaaggtgtacgatgaggcctgggagcggatcgataagaaggtggagggcctgagcaagcacatcaagctggaggaggaacggagatctgaggacgcccagagcaaggccgccctgaccgactggctgagagccaaggccagcttcgtcatcgaggggctgaaggaggccgacaaggacgagttctgccggtgcgaactgaagctgcagaagtggtacggagatctgagaggcaaacctttcgccatcgaggccgagaacagcatcctggacatcagcggcttcagcaagcagtacaactgcgcctttatttggcagaaggacggagtgaagaagctgaacctgtacctgatcatcaactatttcaagggcggcaagctgagattcaagaagatcaagcctgaagccttcgaggccaacagattctacaccgtgattaacaagaaaagcggagagatcgtgccaatggaagtgaacttcaacttcgacgaccctaacctgatcatcctgcccctggcatttggcaagcggcagggcagagagttcatctggaacgacctgctgtctctggagaccggcagcctgaagctggccaacggcagagtgatcgagaagacactgtacaacagacgaaccagacaagacgagcccgccctgtttgtggccctgaccttcgagagaagagaggtgctggacagcagcaatatcaagcctatgaacctgatcggcgtggaccggggcgagaacatccctgccgtgatcgcccttaccgaccccgagggatgccctctgagccggtttaaagacagcctgggcaaccctacccacatcctgagaattggcgagtcctacaaggagaagcagagaaccatccaggccaagaaggaggtggagcagcggcgggctggcggctactcccggaagtacgccagcaaggccaagaacctggccgacgacatggttagaaataccgccagagacctcctgtactacgctgtgacccaggacgccatgctgatcttcgagaacctgagcagaggcttcggcagacagggcaagagaaccttcatggccgagagacagtacacccggatggaggactggctgaccgccaagctggcctacgagggcctgtctaagacctacctgtccaagaccttggcacagtacaccagcaagacatgctctaactgcggcttcacaatcacgagcgccgactacgaccgggtgctggagaaactgaagaagaccgccacaggctggatgaccaccattaacggcaaggagctgaaggtggagggccagatcacctactacaacaggtacaaacggcagaacgtggtgaaggacctgagcgtggaactggatagactgagcgaggaaagcgtaaacaatgacatcagcagctggaccaagggccggagcggcgaggccctgagcctgctgaagaagagattctcccacagaccagtgcaggagaagttcgtgtgtctgaactgcggcttcgagacccacgccgacgagcaagccgccctgaacatcgcccggtcttggcttttcctgcggagccaggagtacaagaagtaccagacaaacaagaccacaggcaacacagacaagagagccttcgtcgagacctggcagagcttctacagaaagaagctgaaggaggtgtggaagcctgccgtg

SEQ ID NO: 13741 - RNA, 2934 nt, synthetic construct
  source 1..2934: mol_type = other RNA
caggagatcaagcggattaataaaattcggagaagactggtgaaggattctaacacaaagaaggctggcaagacaggccctatgaagacactgctggtgagagtgatgacacccgacctgagagaaagactggaaaacctgagaaagaagcctgagaatatcccccagcccatcagcaacacaagccgggccaacctgaataagctgctgaccgactacaccgaaatgaagaaggccatcctgcacgtgtattgggaagagttccagaaagacccagtcggcctgatgagcagagtggctcagcctgccagcaagaagatcgatcagaacaagctgaagcccgaaatggacgagaaggggaacctgacaaccgccggctttgcctgtagccagtgcggccagcccctgtttgtgtacaaactggaacaggtgagcgaaaagggcaaggcttacacgaattacttcggcagatgcaacgtggccgagcacgagaagctgatcctgctggcccagctgaagcctgagaaggatagcgatgaggcagtgacatattccctgggcaagttcggacagcgggccctggatttttattccattcatgtgaccaaggaatccacccaccccgtcaagcctcttgcccaaattgccggcaacagatacgccagcggccccgtgggcaaggccctgagcgacgcctgtatgggcaccatcgccagcttcctgtctaagtaccaggacattatcatcgagcaccagaaggtggtgaagggcaaccagaagagactggagagcctgcgcgagctggccggcaaggaaaacctggagtatcctagcgtgaccctgcctcctcagcctcatacaaaggagggcgtggatgcctacaacgaagtgatcgcccgggtgcggatgtgggtgaacctgaatctgtggcagaagctgaagctgtctagagacgacgccaagcccctgctgagactgaagggcttccccagcttccctctggtggagagacaggcaaatgaagtggactggtgggacatggtgtgtaacgtgaagaagctgatcaatgagaagaaggaggacggcaaagtgttctggcagaatctggccggctacaagcgtcaggaggccctgcggccctacctgagcagcgaggaagacagaaagaagggcaagaagttcgcccggtatcagctgggggacctgctgctgcacctcgagaagaagcacggcgaagactgggggaaggtgtacgatgaggcctgggagcggatcgataagaaggtggagggcctgagcaagcacatcaagctggaggaggaacggagatctgaggacgcccagagcaaggccgccctgaccgactggctgagagccaaggccagcttcgtcatcgaggggctgaaggaggccgacaaggacgagttctgccggtgcgaactgaagctgcagaagtggtacggagatctgagaggcaaacctttcgccatcgaggccgagaacagcatcctggacatcagcggcttcagcaagcagtacaactgcgcctttatttggcagaaggacggagtgaagaagctgaacctgtacctgatcatcaactatttcaagggcggcaagctgagattcaagaagatcaagcctgaagccttcgaggccaacagattctacaccgtgattaacaagaaaagcggagagatcgtgccaatggaagtgaacttcaacttcgacgaccctaacctgatcatcctgcccctggcatttggcaagcggcagggcagagagttcatctggaacgacctgctgtctctggagaccggcagcctgaagctggccaacggcagagtgatcgagaagacactgtacaacagacgaaccagacaagacgagcccgccctgtttgtggccctgaccttcgagagaagagaggtgctggacagcagcaatatcaagcctatgaacctgatcggcgtggaccggggcgagaacatccctgccgtgatcgcccttaccgaccccgagggatgccctctgagccggtttaaagacagcctgggcaaccctacccacatcctgagaattggcgagtcctacaaggagaagcagagaaccatccaggccaagaaggaggtggagcagcggcgggctggcggctactcccggaagtacgccagcaaggccaagaacctggccgacgacatggttagaaataccgccagagacctcctgtactacgctgtgacccaggacgccatgctgatcttcgagaacctgagcagaggcttcggcagacagggcaagagaaccttcatggccgagagacagtacacccggatggaggactggctgaccgccaagctggcctacgagggcctgccctctaagacctacctgtccaagaccttggcacagtacaccagcaagacatgctctaactgcggcttcacaatcacgagcgccgactacgaccgggtgctggagaaactgaagaagaccgccacaggctggatgaccaccattaacggcaaggagctgaaggtggagggccagatcacctactacaacaggtacaaacggcagaacgtggtgaaggacctgagcgtggaactggatagactgagcgaggaaagcgtaaacaatgacatcagcagctggaccaagggccggagcggcgaggccctgagcctgctgaagaagagattctcccacagaccagtgcaggagaagttcgtgtgtctgaactgcggcttcgagacccacgccgacgagcaagccgccctgaacatcgcccggtcttggcttttcctgcggagccaggagtacaagaagtaccagacaaacaagaccacaggcaacacagacaagagagccttcgtcgagacctggcagagcttctacagaaagaagctgaaggaggtgtggaagcctgccgtg

SEQ ID NO: 13742 - RNA, 2937 nt, synthetic construct
  source 1..2937: mol_type = other RNA
caggagatcaagcggattaataaaattcggagaagactggtgaaggattctaacacaaagaaggctggcaagacacggggccctatgaagacactgctggtgagagtgatgacacccgacctgagagaaagactggaaaacctgagaaagaagcctgagaatatcccccagcccatcagcaacacaagccgggccaacctgaataagctgctgaccgactacaccgaaatgaagaaggccatcctgcacgtgtattgggaagagttccagaaagacccagtcggcctgatgagcagagtggctcagcctgccagcaagaagatcgatcagaacaagctgaagcccgaaatggacgagaaggggaacctgacaaccgccggctttgcctgtagccagtgcggccagcccctgtttgtgtacaaactggaacaggtgagcgaaaagggcaaggcttacacgaattacttcggcagatgcaacgtggccgagcacgagaagctgatcaagctggcccagctgaagcctgagaaggatagcgatgaggcagtgacatattccctgggcaagttcggacagcgggccctggatttttattccattcatgtgaccaaggaatccacccaccccgtcaagcctcttgcccaaattgccggcaacagatacgcctccagccccgtgggcaaggccctgagcgacgcctgtatgggcaccatcgccagcttcctgtctaagtaccaggacattatcatcgagcaccagaaggtggtgaagggcaaccagaagagactggagagcctgcgcgagctggccggcaaggaaaacctggagtatcctagcgtgaccctgcctcctcagcctcatacaaaggagggcgtggatgcctacaacgaagtgatcgcccgggtgcggatgtgggtgaacctgaatctgtggcagaagctgaagctgtctagagacgacgccaagcccctgctgagactgaagggcttccccagcttccctctggtggagagacaggcaaatgaagtggactggtgggacatggtgtgtaacgtgaagaagctgatcaatgagaagaaggaggacggcaaagtgttctggcagaatctggccggctacaagcgtcaggaggccctgcggccctacctgagcagcgaggaagacagaaagaagggcaagaagttcgcccggtatcagctgggggacctgctgctgcacctcgagaagaagcacggcgaagactgggggaaggtgtacgatgaggcctgggagcggatcgataagaaggtggagggcctgagcaagcacatcaagctggaggaggaacggagatctgaggacgcccagagcaaggccgccctgaccgactggctgagagccaaggccagcttcgtcatcgaggggctgaaggaggccgacaaggacgagttctgccggtgcgaactgaagctgcagaagtggtacggagatctgagaggcaaacctttcgccatcgaggccgagaacagcatcctggacatcagcggcttcagcaagcagtacaactgcgcctttatttggcagaaggacggagtgaagaagctgaacctgtacctgatcatcaactatttcaagggcggcaagctgagattcaagaagatcaagcctgaagccttcgaggccaacagattctacaccgtgattaacaagaaaagcggagagatcgtgccaatggaagtgaacttcaacttcgacgaccctaacctgatcatcctgcccctggcatttggcaagcggcagggcagagagttcatctggaacgacctgctgtctctggagaccggcagcctgaagctggccaacggcagagtgatcgagaagacactgtacaacagacgaaccagacaagacgagcccgccctgtttgtggccctgaccttcgagagaagagaggtgctggacagcagcaatatcaagcctatgaacctgatcggcgtggaccggggcgagaacatccctgccgtgatcgcccttaccgaccccgagggatgccctctgagccggtttaaagacagcctgggcaaccctacccacatcctgagaattggcgagtcctacaaggagaagcagagaaccatccaggccaagaaggaggtggagcagcggcgggctggcggctactcccggaagtacgccagcaaggccaagaacctggccgacgacatggttagaaataccgccagagacctcctgtactacgctgtgacccaggacgccatgctgatcttcgagaacctgagcagaggcttcggcagacagggcaagagaaccttcatggccgagagacagtacacccggatggaggactggctgaccgccaagctggcctacgagggcctgccctctaagacctacctgtccaagaccttggcacagtacaccagcaagacatgctctaactgcggcttcacaatcacgagcgccgactacgaccgggtgctggagaaactgaagaagaccgccacaggctggatgaccaccattaacggcaaggagctgaaggtggagggccagatcacctactacaacaggtacaaacggcagaacgtggtgaaggacctgagcgtggaactggatagactgagcgaggaaagcgtaaacaatgacatcagcagctggaccaagggccggagcggcgaggccctgagcctgctgaagaagagattctcccacagaccagtgcaggagaagttcgtgtgtctgaactgcggcttcgagacccacgccgacgagcaagccgccctgaacatcgcccggtcttggcttttcctgcggagccaggagtacaagaagtaccagacaaacaagaccacaggcaacacagacaagagagccttcgtcgagacctggcagagcttctacagaaagaagctgaaggaggtgtggaagcctgccgtg

SEQ ID NO: 13743 - RNA, 2934 nt, synthetic construct
  source 1..2934: mol_type = other RNA
caggagatcaagcggattaataaaattcggagaagactggtgaaggattctaacacaaagaaggctggcaagacaggccctatgaagacactgctggtgagagtgatgacacccgacctgagagaaagactggaaaacctgagaaagaagcctgagaatatcccccagcccatcagcaacacaagccgggccaacctgaataagctgctgaccgactacaccgaaatgaagaaggccatcctgcacgtgtattgggaagagttccagaaagacccagtcggcctgatgagcagagtggctcagcctgccagcaagaagatcgatcagaacaagctgaagcccgaaatggacgagaaggggaacctgacaaccgccggctttgcctgtagccagtgcggccagcccctgtttgtgtacaaactggaacaggtgagcgaaaagggcaaggcttacacgaattacttcggcagatgcaacgtggccgagcacgagaagctgatcctgctggcccagctgaagcctgagaaggatagcgatgaggcagtgacatattccctgggcaagttcggacagcgggccctggatttttattccattcatgtgaccaaggaatccacccaccccgtcaagcctcttgcccaaattgccggcaacagatacgccagcggccccgtgggcaaggccctgagcgacgcctgtatgggcaccatcgccagcttcctgtctaagtaccaggacattatcatcgagcaccagaaggtggtgaagggcaaccagaagagactggagagcctgcgcgagctggccggcaaggaaaacctggagtatcctagcgtgaccctgcctcctcagcctcatacaaaggagggcgtggatgcctacaacgaagtgatcgcccgggtgcggatgtgggtgaacctgaatctgtggcagaagctgaagctgtctagagacgacgccaagcccctgctgagactgaagaagttccccagcttccctctggtggagagacaggcaaatgaagtggactggtgggacatggtgtgtaacgtgaagaagctgatcaatgagaagaaggaggacggcaaagtgttctggcagaatctggccggctacaagcgtcaggaggccctgcggccctacctgagcagcgaggaagacagaaagaagggcaagaagttcgcccggtatcagctgggggacctgctgctgcacctcgagaagaagcacggcgaagactgggggaaggtgtacgatgaggcctgggagcggatcgataagaaggtggagggcctgagcaagcacatcaagctggaggaggaacggagatctgaggacgcccagagcaaggccgccctgaccgactggctgagagccaaggccagcttcgtcatcgaggggctgaaggaggccgacaaggacgagttctgccggtgcgaactgaagctgcagaagtggtacggagatctgagaggcaaacctttcgccatcgaggccgagaacagcatcctggacatcagcggcttcagcaagcagtacaactgcgcctttatttggcagaaggacggagtgaagaagctgaacctgtacctgatcatcaactatttcaagggcggcaagctgagattcaagaagatcaagcctgaagccttcgaggccaacagattctacaccgtgattaacaagaaaagcggagagatcgtgccaatggaagtgaacttcaacttcgacgaccctaacctgatcatcctgcccctggcatttggcaagcggcagggcagagagttcatctggaacgacctgctgtctctggagaccggcagcctgaagctggccaacggcagagtgatcgagaagacactgtacaacagacgaaccagacaagacgagcccgccctgtttgtggccctgaccttcgagagaagagaggtgctggacagcagcaatatcaagcctatgaacctgatcggcgtggaccggggcgagaacatccctgccgtgatcgcccttaccgaccccgagggatgccctctgagccggtttaaagacagcctgggcaaccctacccacatcctgagaattggcgagtcctacaaggagaagcagagaaccatccaggccaagaaggaggtggagcagcggcgggctggcggctactcccggaagtacgccagcaaggccaagaacctggccgacgacatggttagaaataccgccagagacctcctgtactacgctgtgacccaggacgccatgctgatcttcgagaacctgagcagaggcttcggcagacagggcaagagaaccttcatggccgagagacagtacacccggatggaggactggctgaccgccaagctggcctacgagggcctgccctctaagacctacctgtccaagaccttggcacagtacaccagcaagacatgctctaactgcggcttcacaatcacgagcgccgactacgaccgggtgctggagaaactgaagaagaccgccacaggctggatgaccaccattaacggcaaggagctgaaggtggagggccagatcacctactacaacaggtacaaacggcagaacgtggtgaaggacctgagcgtggaactggatagactgagcgaggaaagcgtaaacaatgacatcagcagctggaccaagggccggagcggcgaggccctgagcctgctgaagaagagattctcccacagaccagtgcaggagaagttcgtgtgtctgaactgcggcttcgagacccacgccgacgagcaagccgccctgaacatcgcccggtcttggcttttcctgcggagccaggagtacaagaagtaccagacaaacaagaccacaggcaacacagacaagagagccttcgtcgagacctggcagagcttctacagaaagaagctgaaggaggtgtggaagcctgccgtg

SEQ ID NO: 13744 - RNA, 2931 nt, synthetic construct; identical to SEQ ID NO: 13740
  source 1..2931: mol_type = other RNA
  modified_base order(8,17,18,21,26,27,38,41,48,49,51,66,81,83,92,95,98,104,107,119,131,140,153,159,161,173,197,201,206,209,217,227,239,242,248,250,252,253,262,263,278,284,287,296,300,306,320,324,335,347,365,379,380,381,385,387,394,407,409,410,411,413,415,422,431,450,451,459,460,463,464,472,479,497,500,503,506,515,522,531,537,545,550,552,553,557,565,566,581,585,586,587,588,589,591,592,596,597,600,602,613,626,633,635,636,644,645,658,674,686,697,699,701,710,718,719,722,724,726,730,740,741,743,746,761,764,785,794,803,821,826,828,831,836,842,846,849,855,858,872,876,880,890,893,902,908,910,914,920,924,926,928,938,944,946,948,968,971,977,985,986,994,995,999,1001,1004,1020,1025,1030,1033,1040,1043,1045,1047,1052,1061,1064,1068,1091,1093,1094,1096,1104,1106,1114,1122,1133,1141,1145,1180,1181,1189,1191,1196,1205,1208,1211,1217,1240,1250,1252,1257,1264,1274,1278,1286,1295,1307,1313,1330,1332,1358,1366,1370,1387,1388,1391,1394,1403,1426,1427,1429,1435,1442,1448,1456,1459,1467,1469,1482,1483,1484,1490,1508,1511,1517,1525,1526,1537,1543,1549,1550,1551,1553,1554,1555,1571,1580,1586,1588,1592,1595,1598,1603,1605,1606,1607,1622,1627,1628,1637,1644,1651,1652,1666,1667,1669,1676,1679,1680,1700,1703,1709,1715,1720,1721,1726,1727,1737,1742,1745,1748,1751,1757,1762,1763,1764,1786,1787,1790,1792,1802,1805,1807,1809,1811,1826,1832,1847,1850,1862,1864,1898,1900,1901,1902,1904,1910,1915,1916,1931,1934,1947,1949,1956,1958,1964,1967,1973,1991,1995,2000,2003,2009,2010,2026,2031,2033,2041,2042,2043,2054,2064,2072,2075,2081,2082,2089,2092,2114,2132,2148,2155,2158,2167,2189,2201,2204,2205,2211,2225,2228,2230,2233,2238,2240,2255,2258,2261,2263,2264,2273,2284,2285,2308,2309,2312,2326,2336,2344,2348,2360,2365,2375,2377,2379,2386,2390,2392,2401,2402,2410,2425,2428,2430,2434,2440,2441,2447,2461,2471,2474,2483,2503,2507,2516,2517,2531,2537,2549,2554,2557,2566,2582,2585,2594,2600,2606,2610,2615,2630,2637,2642,2650,2678,2684,2687,2698,2699,2701,2714,2725,2726,2729,2731,2733,2735,2740,2746,2747,2777,2783,2791,2793,2794,2798,2799,2800,2801,2804,2818,2827,2869,2870,2873,2881,2890,2891,2893,2906,2915,2917,2925,2930): mod_base = m1f

SEQ ID NO: 13745 - RNA, 2934 nt, synthetic construct; identical to SEQ ID NO: 13741
  source 1..2934: mol_type = other RNA
  modified_base order(8,17,18,21,26,27,38,41,48,49,51,66,81,83,92,95,98,104,107,119,131,140,153,159,161,173,197,201,206,209,217,227,239,242,248,250,252,253,262,263,278,284,287,296,300,306,320,324,335,347,365,379,380,381,385,387,394,407,409,410,411,413,415,422,431,450,451,459,460,463,464,472,479,497,500,503,506,515,522,531,537,545,550,552,553,557,565,566,581,585,586,587,588,589,591,592,596,597,600,602,613,626,633,635,636,644,645,658,674,686,697,699,701,710,718,719,722,724,726,730,740,741,743,746,761,764,785,794,803,821,826,828,831,836,842,846,849,855,858,872,876,880,890,893,902,908,910,914,920,924,926,928,938,944,946,948,968,971,977,985,986,994,995,999,1001,1004,1020,1025,1030,1033,1040,1043,1045,1047,1052,1061,1064,1068,1091,1093,1094,1096,1104,1106,1114,1122,1133,1141,1145,1180,1181,1189,1191,1196,1205,1208,1211,1217,1240,1250,1252,1257,1264,1274,1278,1286,1295,1307,1313,1330,1332,1358,1366,1370,1387,1388,1391,1394,1403,1426,1427,1429,1435,1442,1448,1456,1459,1467,1469,1482,1483,1484,1490,1508,1511,1517,1525,1526,1537,1543,1549,1550,1551,1553,1554,1555,1571,1580,1586,1588,1592,1595,1598,1603,1605,1606,1607,1622,1627,1628,1637,1644,1651,1652,1666,1667,1669,1676,1679,1680,1700,1703,1709,1715,1720,1721,1726,1727,1737,1742,1745,1748,1751,1757,1762,1763,1764,1786,1787,1790,1792,1802,1805,1807,1809,1811,1826,1832,1847,1850,1862,1864,1898,1900,1901,1902,1904,1910,1915,1916,1931,1934,1947,1949,1956,1958,1964,1967,1973,1991,1995,2000,2003,2009,2010,2026,2031,2033,2041,2042,2043,2054,2064,2072,2075,2081,2082,2089,2092,2114,2132,2148,2155,2158,2167,2189,2201,2204,2205,2211,2225,2228,2230,2233,2238,2240,2255,2258,2261,2263,2264,2273,2284,2285,2308,2309,2312,2326,2336,2344,2348,2360,2365,2375,2380,2382,2389,2393,2395,2404,2405,2413,2428,2431,2433,2437,2443,2444,2450,2464,2474,2477,2486,2506,2510,2519,2520,2534,2540,2552,2557,2560,2569,2585,2588,2597,2603,2609,2613,2618,2633,2640,2645,2653,2681,2687,2690,2701,2702,2704,2717,2728,2729,2732,2734,2736,2738,2743,2749,2750,2780,2786,2794,2796,2797,2801,2802,2803,2804,2807,2821,2830,2872,2873,2876,2884,2893,2894,2896,2909,2918,2920,2928,2933): mod_base = m1f

SEQ ID NO: 13746 - RNA, 2937 nt, synthetic construct; identical to SEQ ID NO: 13742
  source 1..2937: mol_type = other RNA
  modified_base order(8,17,18,21,26,27,38,41,48,49,51,66,84,86,95,98,101,107,110,122,134,143,156,162,164,176,200,204,209,212,220,230,242,245,251,253,255,256,265,266,281,287,290,299,303,309,323,327,338,350,368,382,383,384,388,390,397,410,412,413,414,416,418,425,434,453,454,462,463,466,467,475,482,500,503,509,518,525,534,540,548,553,555,556,560,568,569,584,588,589,590,591,592,594,595,599,600,603,605,616,629,636,638,639,647,648,661,667,677,689,700,702,704,713,721,722,725,727,729,733,743,744,746,749,764,767,788,797,806,824,829,831,834,839,845,849,852,858,861,875,879,883,893,896,905,911,913,917,923,927,929,931,941,947,949,951,971,974,980,988,989,997,998,1002,1004,1007,1023,1028,1033,1036,1043,1046,1048,1050,1055,1064,1067,1071,1094,1096,1097,1099,1107,1109,1117,1125,1136,1144,1148,1183,1184,1192,1194,1199,1208,1211,1214,1220,1243,1253,1255,1260,1267,1277,1281,1289,1298,1310,1316,1333,1335,1361,1369,1373,1390,1391,1394,1397,1406,1429,1430,1432,1438,1445,1451,1459,1462,1470,1472,1485,1486,1487,1493,1511,1514,1520,1528,1529,1540,1546,1552,1553,1554,1556,1557,1558,1574,1583,1589,1591,1595,1598,1601,1606,1608,1609,1610,1625,1630,1631,1640,1647,1654,1655,1669,1670,1672,1679,1682,1683,1703,1706,1712,1718,1723,1724,1729,1730,1740,1745,1748,1751,1754,1760,1765,1766,1767,1789,1790,1793,1795,1805,1808,1810,1812,1814,1829,1835,1850,1853,1865,1867,1901,1903,1904,1905,1907,1913,1918,1919,1934,1937,1950,1952,1959,1961,1967,1970,1976,1994,1998,2003,2006,2012,2013,2029,2034,2036,2044,2045,2046,2057,2067,2075,2078,2084,2085,2092,2095,2117,2135,2151,2158,2161,2170,2192,2204,2207,2208,2214,2228,2231,2233,2236,2241,2243,2258,2261,2264,2266,2267,2276,2287,2288,2311,2312,2315,2329,2339,2347,2351,2363,2368,2378,2383,2385,2392,2396,2398,2407,2408,2416,2431,2434,2436,2440,2446,2447,2453,2467,2477,2480,2489,2509,2513,2522,2523,2537,2543,2555,2560,2563,2572,2588,2591,2600,2606,2612,2616,2621,2636,2643,2648,2656,2684,2690,2693,2704,2705,2707,2720,2731,2732,2735,2737,2739,2741,2746,2752,2753,2783,2789,2797,2799,2800,2804,2805,2806,2807,2810,2824,2833,2875,2876,2879,2887,2896,2897,2899,2912,2921,2923,2931,2936): mod_base = m1f

SEQ ID NO: 13747 - RNA, 2934 nt, synthetic construct; identical to SEQ ID NO: 13743
  source 1..2934: mol_type = other RNA
  modified_base order(8,17,18,21,26,27,38,41,48,49,51,66,81,83,92,95,98,104,107,119,131,140,153,159,161,173,197,201,206,209,217,227,239,242,248,250,252,253,262,263,278,284,287,296,300,306,320,324,335,347,365,379,380,381,385,387,394,407,409,410,411,413,415,422,431,450,451,459,460,463,464,472,479,497,500,503,506,515,522,531,537,545,550,552,553,557,565,566,581,585,586,587,588,589,591,592,596,597,600,602,613,626,633,635,636,644,645,658,674,686,697,699,701,710,718,719,722,724,726,730,740,741,743,746,761,764,785,794,803,821,826,828,831,836,842,846,849,855,858,872,876,880,890,893,902,908,910,914,920,924,926,928,938,944,946,948,968,971,977,985,986,994,995,999,1001,1004,1020,1025,1030,1033,1040,1043,1045,1047,1052,1061,1064,1068,1091,1093,1094,1096,1104,1106,1114,1122,1133,1141,1145,1180,1181,1189,1191,1196,1205,1208,1211,1217,1240,1250,1252,1257,1264,1274,1278,1286,1295,1307,1313,1330,1332,1358,1366,1370,1387,1388,1391,1394,1403,1426,1427,1429,1435,1442,1448,1456,1459,1467,1469,1482,1483,1484,1490,1508,1511,1517,1525,1526,1537,1543,1549,1550,1551,1553,1554,1555,1571,1580,1586,1588,1592,1595,1598,1603,1605,1606,1607,1622,1627,1628,1637,1644,1651,1652,1666,1667,1669,1676,1679,1680,1700,1703,1709,1715,1720,1721,1726,1727,1737,1742,1745,1748,1751,1757,1762,1763,1764,1786,1787,1790,1792,1802,1805,1807,1809,1811,1826,1832,1847,1850,1862,1864,1898,1900,1901,1902,1904,1910,1915,1916,1931,1934,1947,1949,1956,1958,1964,1967,1973,1991,1995,2000,2003,2009,2010,2026,2031,2033,2041,2042,2043,2054,2064,2072,2075,2081,2082,2089,2092,2114,2132,2148,2155,2158,2167,2189,2201,2204,2205,2211,2225,2228,2230,2233,2238,2240,2255,2258,2261,2263,2264,2273,2284,2285,2308,2309,2312,2326,2336,2344,2348,2360,2365,2375,2380,2382,2389,2393,2395,2404,2405,2413,2428,2431,2433,2437,2443,2444,2450,2464,2474,2477,2486,2506,2510,2519,2520,2534,2540,2552,2557,2560,2569,2585,2588,2597,2603,2609,2613,2618,2633,2640,2645,2653,2681,2687,2690,2701,2702,2704,2717,2728,2729,2732,2734,2736,2738,2743,2749,2750,2780,2786,2794,2796,2797,2801,2802,2803,2804,2807,2821,2830,2872,2873,2876,2884,2893,2894,2896,2909,2918,2920,2928,2933): mod_base = m1f

SEQ ID NO: 13748 - RNA, 109 nt, synthetic construct
  source 1..109: mol_type = other RNA
actggcgcttttatctgattactttgagagccatcaccagcgactatgtcgtagtgggtaaagctccctcttcggagggagcatcaaagnnnnnnnnnnnnnnnnnnnn

SEQ ID NO: 13749 - RNA, 109 nt, synthetic construct; identical to SEQ ID NO: 13748
  modified_base 1..4: mod_base = OTHER; note = nucleotides linked via phosphorothioate
  modified_base 1: mod_base = OTHER; note = 2'-O-methyl-adenosine
  modified_base 2: mod_base = cm
  modified_base 3: mod_base = um
  modified_base 107..109: mod_base = OTHER; note = nucleotides linked via phosphorothioate
  modified_base 107: mod_base = OTHER; note = any 2'-O-methyl ribonucelotide
  modified_base 108: mod_base = OTHER; note = any 2'-O-methyl ribonucelotide
  modified_base 109: mod_base = OTHER; note = any 2'-O-methyl ribonucelotide
  source 1..109: mol_type = other RNA

SEQ ID NO: 13750 - RNA, 112 nt, synthetic construct
  modified_base 1..4: mod_base = OTHER; note = nucleotides linked via phosphorothioate
  modified_base 1: mod_base = OTHER; note = 2'-O-methyl-adenosine
  modified_base 2: mod_base = cm
  modified_base 3: mod_base = um
  modified_base 109..112: mod_base = OTHER; note = nucleotides linked via phosphorothioate
  modified_base 110: mod_base = um
  modified_base 111: mod_base = um
  modified_base 112: mod_base = um
  source 1..112: mol_type = other RNA
actggcgcttttatctgattactttgagagccatcaccagcgactatgtcgtagtgggtaaagctccctcttcggagggagcatcaaagnnnnnnnnnnnnnnnnnnnnttt

SEQ ID NO: 13751 - RNA, 109 nt, synthetic construct; identical to SEQ ID NO: 13748
  modified_base 1..4: mod_base = OTHER; note = nucleotides linked via phosphorothioate
  modified_base 1: mod_base = OTHER; note = 2'-O-methyl-adenosine
  modified_base 2: mod_base = cm
  modified_base 3: mod_base = um
  modified_base 4: mod_base = gm
  modified_base 5: mod_base = gm
  modified_base 6: mod_base = cm
  modified_base 7: mod_base = gm
  modified_base 8: mod_base = cm
  modified_base 9: mod_base = um
  modified_base 10: mod_base = um
  modified_base 11: mod_base = um
  modified_base 12: mod_base = um
  modified_base 13: mod_base = OTHER; note = 2'-O-methyl-adenosine
  modified_base 14: mod_base = um
  modified_base 15: mod_base = cm
  modified_base 16: mod_base = um
  modified_base 17: mod_base = gm
  modified_base 18: mod_base = OTHER; note = 2'-O-methyl-adenosine
  modified_base 19: mod_base = um
  modified_base 27: mod_base = OTHER; note = 2'-O-methyl-adenosine
  modified_base 28: mod_base = gm
  modified_base 29: mod_base = OTHER; note = 2'-O-methyl-adenosine
  modified_base 30: mod_base = gm
  modified_base 31: mod_base = cm
  modified_base 32: mod_base = cm
  modified_base 33: mod_base = OTHER; note = 2'-O-methyl-adenosine
  modified_base 34: mod_base = um
  modified_base 35: mod_base = cm
  modified_base 36: mod_base = OTHER; note = 2'-O-methyl-adenosine
  modified_base 37: mod_base = cm
  modified_base 38: mod_base = cm
  modified_base 44: mod_base = cm
  modified_base 45: mod_base = um
  modified_base 48: mod_base = gm
  modified_base 49: mod_base = um
  modified_base 50: mod_base = cm
  modified_base 51: mod_base = gm
  modified_base 57: mod_base = gm
  modified_base 58: mod_base = gm
  modified_base 59: mod_base = um
  modified_base 60: mod_base = OTHER; note = 2'-O-methyl-adenosine
  modified_base 61: mod_base = OTHER; note = 2'-O-methyl-adenosine
  modified_base 62: mod_base = OTHER; note = 2'-O-methyl-adenosine
  modified_base 63: mod_base = gm
  modified_base 64: mod_base = cm
  modified_base 65: mod_base = um
  modified_base 66: mod_base = cm
  modified_base 67: mod_base = cm
  modified_base 68: mod_base = cm
  modified_base 69: mod_base = um
  modified_base 70: mod_base = cm
  modified_base 71: mod_base = um
  modified_base 72: mod_base = um
  modified_base 73: mod_base = cm
  modified_base 74: mod_base = gm
  modified_base 75: mod_base = gm
  modified_base 76: mod_base = OTHER; note = 2'-O-methyl-adenosine
  modified_base 77: mod_base = gm
  modified_base 78: mod_base = gm
  modified_base 79: mod_base = gm
  modified_base 80: mod_base = OTHER; note = 2'-O-methyl-adenosine
  modified_base 81: mod_base = gm
  modified_base 82: mod_base = cm
  modified_base 83: mod_base = OTHER; note = 2'-O-methyl-adenosine
  modified_base 84: mod_base = um
  modified_base 85: mod_base = cm
  modified_base 86: mod_base = OTHER; note = 2'-O-methyl-adenosine
  modified_base 107: mod_base = OTHER; note = any 2'-O-methyl ribonucelotide
  modified_base 107..109: mod_base = OTHER; note = nucleotides linked via phosphorothioate
  modified_base 108: mod_base = OTHER; note = any 2'-O-methyl ribonucelotide
  modified_base 109: mod_base = OTHER; note = any 2'-O-methyl ribonucelotide
  source 1..109: mol_type = other RNA

SEQ ID NO: 13752 - RNA, 109 nt, synthetic construct; identical to SEQ ID NO: 13748
  modified_base 1..4: mod_base = OTHER; note = nucleotides linked via phosphorothioate
  modified_base 1: mod_base = OTHER; note = 2'-O-methyl-adenosine
  modified_base 2: mod_base = cm
  modified_base 3: mod_base = um
  modified_base 4: mod_base = gm
  modified_base 5: mod_base = gm
  modified_base 6: mod_base = cm
  modified_base 7: mod_base = gm
  modified_base 8: mod_base = cm
  modified_base 13: mod_base = OTHER; note = 2'-O-methyl-adenosine
  modified_base 14: mod_base = um
  modified_base 15: mod_base = cm
  modified_base 16: mod_base = um
  modified_base 17: mod_base = gm
  modified_base 18: mod_base = OTHER; note = 2'-O-methyl-adenosine
  modified_base 19: mod_base = um
  modified_base 27: mod_base = OTHER; note = 2'-O-methyl-adenosine
  modified_base 28: mod_base = gm
  modified_base 29: mod_base = OTHER; note = 2'-O-methyl-adenosine
  modified_base 30: mod_base = gm
  modified_base 31: mod_base = cm
  modified_base 32: mod_base = cm
  modified_base 33: mod_base = OTHER; note = 2'-O-methyl-adenosine
  modified_base 34: mod_base = um
  modified_base 35: mod_base = cm
  modified_base 36: mod_base = OTHER; note = 2'-O-methyl-adenosine
  modified_base 37: mod_base = cm
  modified_base 38: mod_base = cm
  modified_base 44: mod_base = cm
  modified_base 45: mod_base = um
  modified_base 48: mod_base = gm
  modified_base 49: mod_base = um
  modified_base 50: mod_base = cm
  modified_base 51: mod_base = gm
  modified_base 57: mod_base = gm
  modified_base 58: mod_base = gm
  modified_base 59: mod_base = um
  modified_base 60: mod_base = OTHER; note = 2'-O-methyl-adenosine
  modified_base 61: mod_base = OTHER; note = 2'-O-methyl-adenosine
  modified_base 62: mod_base = OTHER; note = 2'-O-methyl-adenosine
  modified_base 63: mod_base = gm
  modified_base 64: mod_base = cm
  modified_base 65: mod_base = um
  modified_base 66: mod_base = cm
  modified_base 67: mod_base = cm
  modified_base 68: mod_base = cm
  modified_base 69: mod_base = um
  modified_base 70: mod_base = cm
  modified_base 71: mod_base = um
  modified_base 72: mod_base = um
  modified_base 73: mod_base = cm
  modified_base 74: mod_base = gm
  modified_base 75: mod_base = gm
  modified_base 76: mod_base = OTHER; note = 2'-O-methyl-adenosine
  modified_base 77: mod_base = gm
  modified_base 78: mod_base = gm
  modified_base 79: mod_base = gm
  modified_base 80: mod_base = OTHER; note = 2'-O-methyl-adenosine
  modified_base 81: mod_base = gm
  modified_base 82: mod_base = cm
  modified_base 83: mod_base = OTHER; note = 2'-O-methyl-adenosine
  modified_base 84: mod_base = um
  modified_base 107: mod_base = OTHER; note = any 2'-O-methyl ribonucelotide
  modified_base 107..109: mod_base = OTHER; note = nucleotides linked via phosphorothioate
  modified_base 108: mod_base = OTHER; note = any 2'-O-methyl ribonucelotide
  modified_base 109: mod_base = OTHER; note = any 2'-O-methyl ribonucelotide
  source 1..109: mol_type = other RNA

SEQ ID NO: 13753 - RNA, 109 nt, synthetic construct; identical to SEQ ID NO: 13748
  modified_base 1..4: mod_base = OTHER; note = nucleotides linked via phosphorothioate
  modified_base 1: mod_base = OTHER; note = 2'-O-methyl-adenosine
  modified_base 2: mod_base = cm
  modified_base 3: mod_base = um
  modified_base 44: mod_base = cm
  modified_base 45: mod_base = um
  modified_base 48: mod_base = gm
  modified_base 49: mod_base = um
  modified_base 50: mod_base = cm
  modified_base 51: mod_base = gm
  modified_base 63: mod_base = gm
  modified_base 64: mod_base = cm
  modified_base 65: mod_base = um
  modified_base 66: mod_base = cm
  modified_base 67: mod_base = cm
  modified_base 68: mod_base = cm
  modified_base 69: mod_base = um
  modified_base 70: mod_base = cm
  modified_base 71: mod_base = um
  modified_base 72: mod_base = um
  modified_base 73: mod_base = cm
  modified_base 74: mod_base = gm
  modified_base 75: mod_base = gm
  modified_base 76: mod_base = OTHER; note = 2'-O-methyl-adenosine
  modified_base 77: mod_base = gm
  modified_base 78: mod_base = gm
  modified_base 79: mod_base = gm
  modified_base 80: mod_base = OTHER; note = 2'-O-methyl-adenosine
  modified_base 81: mod_base = gm
  modified_base 82: mod_base = cm
  modified_base 107: mod_base = OTHER; note = any 2'-O-methyl ribonucelotide
  modified_base 107..109: mod_base = OTHER; note = nucleotides linked via phosphorothioate
  modified_base 108: mod_base = OTHER; note = any 2'-O-methyl ribonucelotide
  modified_base 109: mod_base = OTHER; note = any 2'-O-methyl ribonucelotide
  source 1..109: mol_type = other RNA

SEQ ID NO: 13754 - RNA, 109 nt, synthetic construct; identical to SEQ ID NO: 13748
  modified_base 1..4: mod_base = OTHER; note = nucleotides linked via phosphorothioate
  modified_base 1: mod_base = OTHER; note = 2'-O-methyl-adenosine
  modified_base 2: mod_base = cm
  modified_base 3: mod_base = um
  modified_base 63: mod_base = gm
  modified_base 64: mod_base = cm
  modified_base 65: mod_base = um
  modified_base 66: mod_base = cm
  modified_base 67: mod_base = cm
  modified_base 68: mod_base = cm
  modified_base 69: mod_base = um
  modified_base 70: mod_base = cm
  modified_base 71: mod_base = um
  modified_base 72: mod_base = um
  modified_base 73: mod_base = cm
  modified_base 74: mod_base = gm
  modified_base 75: mod_base = gm
  modified_base 76: mod_base = OTHER; note = 2'-O-methyl-adenosine
  modified_base 77: mod_base = gm
  modified_base 78: mod_base = gm
  modified_base 79: mod_base = gm
  modified_base 80: mod_base = OTHER; note = 2'-O-methyl-adenosine
  modified_base 81: mod_base = gm
  modified_base 82: mod_base = cm
  modified_base 107: mod_base = OTHER; note = any 2'-O-methyl ribonucelotide
  modified_base 107..109: mod_base = OTHER; note = nucleotides linked via phosphorothioate
  modified_base 108: mod_base = OTHER; note = any 2'-O-methyl ribonucelotide
  modified_base 109: mod_base = OTHER; note = any 2'-O-methyl ribonucelotide
  source 1..109: mol_type = other RNA

SEQ ID NO: 13755 - RNA, 109 nt, synthetic construct; identical to SEQ ID NO: 13748
  modified_base 1..4: mod_base = OTHER; note = nucleotides linked via phosphorothioate
  modified_base 1: mod_base = OTHER; note = 2'-O-methyl-adenosine
  modified_base 2: mod_base = cm
  modified_base 3: mod_base = um
  modified_base 6: mod_base = cm
  modified_base 8: mod_base = cm
  modified_base 9: mod_base = um
  modified_base 14: mod_base = um
  modified_base 15: mod_base = cm
  modified_base 27: mod_base = OTHER; note = 2'-O-methyl-adenosine
  modified_base 28: mod_base = gm
  modified_base 33: mod_base = OTHER; note = 2'-O-methyl-adenosine
  modified_base 34: mod_base = um
  modified_base 35: mod_base = cm
  modified_base 36: mod_base = OTHER; note = 2'-O-methyl-adenosine
  modified_base 37: mod_base = cm
  modified_base 42: mod_base = gm
  modified_base 43: mod_base = OTHER; note = 2'-O-methyl-adenosine
  modified_base 44: mod_base = cm
  modified_base 45: mod_base = um
  modified_base 48: mod_base = gm
  modified_base 49: mod_base = um
  modified_base 50: mod_base = cm
  modified_base 51: mod_base = gm
  modified_base 58: mod_base = gm
  modified_base 59: mod_base = um
  modified_base 61: mod_base = OTHER; note = 2'-O-methyl-adenosine
  modified_base 62: mod_base = OTHER; note = 2'-O-methyl-adenosine
  modified_base 63: mod_base = gm
  modified_base 64: mod_base = cm
  modified_base 65: mod_base = um
  modified_base 66: mod_base = cm
  modified_base 67: mod_base = cm
  modified_base 68: mod_base = cm
  modified_base 69: mod_base = um
  modified_base 70: mod_base = cm
  modified_base 71: mod_base = um
  modified_base 72: mod_base = um
  modified_base 73: mod_base = cm
  modified_base 74: mod_base = gm
  modified_base 75: mod_base = gm
  modified_base 76: mod_base = OTHER; note = 2'-O-methyl-adenosine
  modified_base 77: mod_base = gm
  modified_base 78: mod_base = gm
  modified_base 79: mod_base = gm
  modified_base 80: mod_base = OTHER; note = 2'-O-methyl-adenosine
  modified_base 81: mod_base = gm
  modified_base 82: mod_base = cm
  modified_base 83: mod_base = OTHER; note = 2'-O-methyl-adenosine
  modified_base 84: mod_base = um
  modified_base 106..109: mod_base = OTHER; note = nucleotides linked via phosphorothioate
  modified_base 107: mod_base = OTHER; note = any 2'-O-methyl ribonucelotide
  modified_base 108: mod_base = OTHER; note = any 2'-O-methyl ribonucelotide
  modified_base 109: mod_base = OTHER; note = any 2'-O-methyl ribonucelotide
  source 1..109: mol_type = other RNA

SEQ ID NO: 13756 - RNA, 109 nt, synthetic construct; identical to SEQ ID NO: 13748
  modified_base 1..4: mod_base = OTHER; note = nucleotides linked via phosphorothioate
  modified_base 1: mod_base = OTHER; note = 2'-O-methyl-adenosine
  modified_base 2: mod_base = cm
  modified_base 3: mod_base = um
  modified_base 33: mod_base = OTHER; note = 2'-O-methyl-adenosine
  modified_base 34: mod_base = um
  modified_base 35: mod_base = cm
  modified_base 36: mod_base = OTHER; note = 2'-O-methyl-adenosine
  modified_base 37: mod_base = cm
  modified_base 42: mod_base = gm
  modified_base 43: mod_base = OTHER; note = 2'-O-methyl-adenosine
  modified_base 44: mod_base = cm
  modified_base 45: mod_base = um
  modified_base 48: mod_base = gm
  modified_base 49: mod_base = um
  modified_base 50: mod_base = cm
  modified_base 51: mod_base = gm
  modified_base 58: mod_base = gm
  modified_base 59: mod_base = um
  modified_base 60: mod_base = OTHER; note = 2'-O-methyl-adenosine
  modified_base 61: mod_base = OTHER; note = 2'-O-methyl-adenosine
  modified_base 63: mod_base = gm
  modified_base 64: mod_base = cm
  modified_base 65: mod_base = um
  modified_base 66: mod_base = cm
  modified_base 67: mod_base = cm
  modified_base 68: mod_base = cm
  modified_base 69: mod_base = um
  modified_base 70: mod_base = cm
  modified_base 71: mod_base = um
  modified_base 72: mod_base = um
  modified_base 73: mod_base = cm
  modified_base 74: mod_base = gm
  modified_base 75: mod_base = gm
  modified_base 76: mod_base = OTHER; note = 2'-O-methyl-adenosine
  modified_base 77: mod_base = gm
  modified_base 78: mod_base = gm
  modified_base 79: mod_base = gm
  modified_base 80: mod_base = OTHER; note = 2'-O-methyl-adenosine
  modified_base 81: mod_base = gm
  modified_base 82: mod_base = cm
  modified_base 83: mod_base = OTHER; note = 2'-O-methyl-adenosine
  modified_base 84: mod_base = um
  modified_base 106..109: mod_base = OTHER; note = nucleotides linked via phosphorothioate
  modified_base 107: mod_base = OTHER; note = any 2'-O-methyl ribonucelotide
  modified_base 108: mod_base = OTHER; note = any 2'-O-methyl ribonucelotide
  modified_base 109: mod_base = OTHER; note = any 2'-O-methyl ribonucelotide
  source 1..109: mol_type = other RNA

SEQ ID NO: 13757 - RNA, 109 nt, synthetic construct; identical to SEQ ID NO: 13748
  modified_base 1..4: mod_base = OTHER; note = nucleotides linked via phosphorothioate
  modified_base 1: mod_base = OTHER; note = 2'-O-methyl-adenosine
  modified_base 2: mod_base = cm
  modified_base 3: mod_base = um
  modified_base 6: mod_base = cm
  modified_base 7: mod_base = gm
  modified_base 9: mod_base = um
  modified_base 14: mod_base = um
  modified_base 15: mod_base = cm
  modified_base 27: mod_base = OTHER; note = 2'-O-methyl-adenosine
  modified_base 28: mod_base = gm
  modified_base 42: mod_base = gm
  modified_base 43: mod_base = OTHER; note = 2'-O-methyl-adenosine
  modified_base 44: mod_base = cm
  modified_base 45: mod_base = um
  modified_base 48: mod_base = gm
  modified_base 49: mod_base = um
  modified_base 50: mod_base = cm
  modified_base 51: mod_base = gm
  modified_base 63: mod_base = gm
  modified_base 64: mod_base = cm
  modified_base 65: mod_base = um
  modified_base 66: mod_base = cm
  modified_base 67: mod_base = cm
  modified_base 68: mod_base = cm
  modified_base 69: mod_base = um
  modified_base 70: mod_base = cm
  modified_base 71: mod_base = um
  modified_base 72: mod_base = um
  modified_base 73: mod_base = cm
  modified_base 74: mod_base = gm
  modified_base 75: mod_base = gm
  modified_base 76: mod_base = OTHER; note = 2'-O-methyl-adenosine
  modified_base 77: mod_base = gm
  modified_base 78: mod_base = gm
  modified_base 79: mod_base = gm
  modified_base 80: mod_base = OTHER; note = 2'-O-methyl-adenosine
  modified_base 81: mod_base = gm
  modified_base 82: mod_base = cm
  modified_base 106..109: mod_base = OTHER; note = nucleotides linked via phosphorothioate
  modified_base 107: mod_base = OTHER; note = any 2'-O-methyl ribonucelotide
  modified_base 108: mod_base = OTHER; note = any 2'-O-methyl ribonucelotide
  modified_base 109: mod_base = OTHER; note = any 2'-O-methyl ribonucelotide
  source 1..109: mol_type = other RNA

SEQ ID NO: 13758 - RNA, 119 nt, synthetic construct
  source 1..119: mol_type = other RNA
actggcgcttctatctgattactctgagcgccatcaccagcgactatgtcgtagtgggtaaagccgcttacggacttcggtccgtaagaggcatcagagnnnnnnnnnnnnnnnnnnnn

SEQ ID NO: 13759 - RNA, 119 nt, synthetic construct; identical to SEQ ID NO: 13758
  modified_base 1..4: mod_base = OTHER; note = nucleotides linked via phosphorothioate
  modified_base 1: mod_base = OTHER; note = 2'-O-methyl-adenosine
  modified_base 2: mod_base = cm
  modified_base 3: mod_base = um
  modified_base 117: mod_base = OTHER; note = any 2'-O-methyl ribonucelotide
  modified_base 117..119: mod_base = OTHER; note = nucleotides linked via phosphorothioate
  modified_base 118: mod_base = OTHER; note = any 2'-O-methyl ribonucelotide
  modified_base 119: mod_base = OTHER; note = any 2'-O-methyl ribonucelotide
  source 1..119: mol_type = other RNA

SEQ ID NO: 13760 - RNA, 122 nt, synthetic construct
  modified_base 1..4: mod_base = OTHER; note = nucleotides linked via phosphorothioate
  modified_base 1: mod_base = OTHER; note = 2'-O-methyl-adenosine
  modified_base 2: mod_base = cm
  modified_base 3: mod_base = um
  modified_base 119..122: mod_base = OTHER; note = nucleotides linked via phosphorothioate
  modified_base 120: mod_base = um
  modified_base 121: mod_base = um
  modified_base 122: mod_base = um
  source 1..122: mol_type = other RNA
actggcgcttctatctgattactctgagcgccatcaccagcgactatgtcgtagtgggtaaagccgcttacggacttcggtccgtaagaggcatcagagnnnnnnnnnnnnnnnnnnnnttt

SEQ ID NO: 13761 - RNA, 119 nt, synthetic construct; identical to SEQ ID NO: 13758
  modified_base 1..4: mod_base = OTHER; note = nucleotides linked via phosphorothioate
  modified_base 1: mod_base = OTHER; note = 2'-O-methyl-adenosine
  modified_base 2: mod_base = cm
  modified_base 3: mod_base = um
  modified_base 4: mod_base = gm
  modified_base 5: mod_base = gm
  modified_base 6: mod_base = cm
  modified_base 7: mod_base = gm
  modified_base 8: mod_base = cm
  modified_base 9: mod_base = um
  modified_base 10: mod_base = um
  modified_base 11: mod_base = cm
  modified_base 12: mod_base = um
  modified_base 13: mod_base = OTHER; note = 2'-O-methyl-adenosine
  modified_base 14: mod_base = um
  modified_base 15: mod_base = cm
  modified_base 16: mod_base = um
  modified_base 17: mod_base = gm
  modified_base 18: mod_base = OTHER; note = 2'-O-methyl-adenosine
  modified_base 19: mod_base = um
  modified_base 27: mod_base = OTHER; note = 2'-O-methyl-adenosine
  modified_base 28: mod_base = gm
  modified_base 29: mod_base = cm
  modified_base 30: mod_base = gm
  modified_base 31: mod_base = cm
  modified_base 32: mod_base = cm
  modified_base 33: mod_base = OTHER; note = 2'-O-methyl-adenosine
  modified_base 34: mod_base = um
  modified_base 35: mod_base = cm
  modified_base 36: mod_base = OTHER; note = 2'-O-methyl-adenosine
  modified_base 37: mod_base = cm
  modified_base 38: mod_base = cm
  modified_base 44: mod_base = cm
  modified_base 45: mod_base = um
  modified_base 48: mod_base = gm
  modified_base 49: mod_base = um
  modified_base 50: mod_base = cm
  modified_base 51: mod_base = gm
  modified_base 57: mod_base = gm
  modified_base 58: mod_base = gm
  modified_base 59: mod_base = um
  modified_base 60: mod_base = OTHER; note = 2'-O-methyl-adenosine
  modified_base 61: mod_base = OTHER; note = 2'-O-methyl-adenosine
  modified_base 62: mod_base = OTHER; note = 2'-O-methyl-adenosine
  modified_base 63: mod_base = gm
  modified_base 64: mod_base = cm
  modified_base 65: mod_base = cm
  modified_base 66: mod_base = gm
  modified_base 67: mod_base = cm
  modified_base 68: mod_base = um
  modified_base 69: mod_base = um
  modified_base 70: mod_base = OTHER; note = 2'-O-methyl-adenosine
  modified_base 71: mod_base = cm
  modified_base 72: mod_base = gm
  modified_base 73: mod_base = gm
  modified_base 74: mod_base = OTHER; note = 2'-O-methyl-adenosine
  modified_base 75: mod_base = cm
  modified_base 76: mod_base = um
  modified_base 77: mod_base = um
  modified_base 78: mod_base = cm
  modified_base 79: mod_base = gm
  modified_base 80: mod_base = gm
  modified_base 81: mod_base = um
  modified_base 82: mod_base = cm
  modified_base 83: mod_base = cm
  modified_base 84: mod_base = gm
  modified_base 85: mod_base = um
  modified_base 86: mod_base = OTHER; note = 2'-O-methyl-adenosine
  modified_base 87: mod_base = OTHER; note = 2'-O-methyl-adenosine
  modified_base 88: mod_base = gm
  modified_base 89: mod_base = OTHER; note = 2'-O-methyl-adenosine
  modified_base 90: mod_base = gm
  modified_base 91: mod_base = gm
  modified_base 92: mod_base = cm
  modified_base 93: mod_base = OTHER; note = 2'-O-methyl-adenosine
  modified_base 94: mod_base = um
  modified_base 95: mod_base = cm
  modified_base 96: mod_base = OTHER; note = 2'-O-methyl-adenosine
  modified_base 117: mod_base = OTHER; note = any 2'-O-methyl ribonucelotide
  modified_base 117..119: mod_base = OTHER; note = nucleotides linked via phosphorothioate
  modified_base 118: mod_base = OTHER; note = any 2'-O-methyl ribonucelotide
  modified_base 119: mod_base = OTHER; note = any 2'-O-methyl ribonucelotide
  source 1..119: mol_type = other RNA

SEQ ID NO: 13762 - RNA, 119 nt, synthetic construct; identical to SEQ ID NO: 13758
  modified_base 1..4: mod_base = OTHER; note = nucleotides linked via phosphorothioate
  modified_base 1: mod_base = OTHER; note = 2'-O-methyl-adenosine
  modified_base 2: mod_base = cm
  modified_base 3: mod_base = um
  modified_base 4: mod_base = gm
  modified_base 5: mod_base = gm
  modified_base 6: mod_base = cm
  modified_base 7: mod_base = gm
  modified_base 8: mod_base = cm
  modified_base 13: mod_base = OTHER; note = 2'-O-methyl-adenosine
  modified_base 14: mod_base = um
  modified_base 15: mod_base = cm
  modified_base 16: mod_base = um
  modified_base 17: mod_base = gm
  modified_base 18: mod_base = OTHER; note = 2'-O-methyl-adenosine
  modified_base 19: mod_base = um
  modified_base 27: mod_base = OTHER; note = 2'-O-methyl-adenosine
  modified_base 28: mod_base = gm
  modified_base 29: mod_base = cm
  modified_base 30: mod_base = gm
  modified_base 31: mod_base = cm
  modified_base 32: mod_base = cm
  modified_base 33: mod_base = OTHER; note = 2'-O-methyl-adenosine
  modified_base 34: mod_base = um
  modified_base 35: mod_base = cm
  modified_base 36: mod_base = OTHER; note = 2'-O-methyl-adenosine
  modified_base 37: mod_base = cm
  modified_base 38: mod_base = cm
  modified_base 44: mod_base = cm
  modified_base 45: mod_base = um
  modified_base 48: mod_base = gm
  modified_base 49: mod_base = um
  modified_base 50: mod_base = cm
  modified_base 51: mod_base = gm
  modified_base 57: mod_base = gm
  modified_base 58: mod_base = gm
  modified_base 59: mod_base = um
  modified_base 60: mod_base = OTHER; note = 2'-O-methyl-adenosine
  modified_base 61: mod_base = OTHER; note = 2'-O-methyl-adenosine
  modified_base 62: mod_base = OTHER; note = 2'-O-methyl-adenosine
  modified_base 63: mod_base = gm
  modified_base 64: mod_base = cm
  modified_base 65: mod_base = cm
  modified_base 66: mod_base = gm
  modified_base 67: mod_base = cm
  modified_base 68: mod_base = um
  modified_base 69: mod_base = um
  modified_base 70: mod_base = OTHER; note = 2'-O-methyl-adenosine
  modified_base 71: mod_base = cm
  modified_base 72: mod_base = gm
  modified_base 73: mod_base = gm
  modified_base 74: mod_base = OTHER; note = 2'-O-methyl-adenosine
  modified_base 75: mod_base = cm
  modified_base 76: mod_base = um
  modified_base 77: mod_base = um
  modified_base 78: mod_base = cm
  modified_base 79: mod_base = gm
  modified_base 80: mod_base = gm
  modified_base 81: mod_base = um
  modified_base 82: mod_base = cm
  modified_base 83: mod_base = cm
  modified_base 84: mod_base = gm
  modified_base 85: mod_base = um
  modified_base 86: mod_base = OTHER; note = 2'-O-methyl-adenosine
  modified_base 87: mod_base = OTHER; note = 2'-O-methyl-adenosine
  modified_base 88: mod_base = gm
  modified_base 89: mod_base = OTHER; note = 2'-O-methyl-adenosine
  modified_base 90: mod_base = gm
  modified_base 91: mod_base = gm
  modified_base 92: mod_base = cm
  modified_base 93: mod_base = OTHER; note = 2'-O-methyl-adenosine
  modified_base 94: mod_base = um
  modified_base 117: mod_base = OTHER; note = any 2'-O-methyl ribonucelotide
  modified_base 117..119: mod_base = OTHER; note = nucleotides linked via phosphorothioate
  modified_base 118: mod_base = OTHER; note = any 2'-O-methyl ribonucelotide
  modified_base 119: mod_base = OTHER; note = any 2'-O-methyl ribonucelotide
  source 1..119: mol_type = other RNA

SEQ ID NO: 13763 - RNA, 119 nt, synthetic construct; identical to SEQ ID NO: 13758
  modified_base 1..4: mod_base = OTHER; note = nucleotides linked via phosphorothioate
  modified_base 1: mod_base = OTHER; note = 2'-O-methyl-adenosine
  modified_base 2: mod_base = cm
  modified_base 3: mod_base = um
  modified_base 44: mod_base = cm
  modified_base 45: mod_base = um
  modified_base 48: mod_base = gm
  modified_base 49: mod_base = um
  modified_base 50: mod_base = cm
  modified_base 51: mod_base = gm
  modified_base 60: mod_base = OTHER; note = 2'-O-methyl-adenosine
  modified_base 61: mod_base = OTHER; note = 2'-O-methyl-adenosine
  modified_base 62: mod_base = OTHER; note = 2'-O-methyl-adenosine
  modified_base 63: mod_base = gm
  modified_base 64: mod_base = cm
  modified_base 65: mod_base = cm
  modified_base 66: mod_base = gm
  modified_base 67: mod_base = cm
  modified_base 68: mod_base = um
  modified_base 69: mod_base = um
  modified_base 70: mod_base = OTHER; note = 2'-O-methyl-adenosine
  modified_base 71: mod_base = cm
  modified_base 72: mod_base = gm
  modified_base 73: mod_base = gm
  modified_base 74: mod_base = OTHER; note = 2'-O-methyl-adenosine
  modified_base 75: mod_base = cm
  modified_base 76: mod_base = um
  modified_base 77: mod_base = um
  modified_base 78: mod_base = cm
  modified_base 79: mod_base = gm
  modified_base 80: mod_base = gm
  modified_base 81: mod_base = um
  modified_base 82: mod_base = cm
  modified_base 83: mod_base = cm
  modified_base 84: mod_base = gm
  modified_base 85: mod_base = um
  modified_base 86: mod_base = OTHER; note = 2'-O-methyl-adenosine
  modified_base 87: mod_base = OTHER; note = 2'-O-methyl-adenosine
  modified_base 88: mod_base = gm
  modified_base 89: mod_base = OTHER; note = 2'-O-methyl-adenosine
  modified_base 90: mod_base = gm
  modified_base 91: mod_base = gm
  modified_base 92: mod_base = cm
  modified_base 117: mod_base = OTHER; note = any 2'-O-methyl ribonucelotide
  modified_base 117..119: mod_base = OTHER; note = nucleotides linked via phosphorothioate
  modified_base 118: mod_base = OTHER; note = any 2'-O-methyl ribonucelotide
  modified_base 119: mod_base = OTHER; note = any 2'-O-methyl ribonucelotide
  source 1..119: mol_type = other RNA

SEQ ID NO: 13764 - RNA, 119 nt, synthetic construct; identical to SEQ ID NO: 13758
  modified_base 1..4: mod_base = OTHER; note = nucleotides linked via phosphorothioate
  modified_base 1: mod_base = OTHER; note = 2'-O-methyl-adenosine
  modified_base 2: mod_base = cm
  modified_base 3: mod_base = um
  modified_base 60: mod_base = OTHER; note = 2'-O-methyl-adenosine
  modified_base 61: mod_base = OTHER; note = 2'-O-methyl-adenosine
  modified_base 62: mod_base = OTHER; note = 2'-O-methyl-adenosine
  modified_base 63: mod_base = gm
  modified_base 64: mod_base = cm
  modified_base 65: mod_base = cm
  modified_base 66: mod_base = gm
  modified_base 67: mod_base = cm
  modified_base 68: mod_base = um
  modified_base 69: mod_base = um
  modified_base 70: mod_base = OTHER; note = 2'-O-methyl-adenosine
  modified_base 71: mod_base = cm
  modified_base 72: mod_base = gm
  modified_base 73: mod_base = gm
  modified_base 74: mod_base = OTHER; note = 2'-O-methyl-adenosine
  modified_base 75: mod_base = cm
  modified_base 76: mod_base = um
  modified_base 77: mod_base = um
  modified_base 78: mod_base = cm
  modified_base 79: mod_base = gm
  modified_base 80: mod_base = gm
  modified_base 81: mod_base = um
  modified_base 82: mod_base = cm
  modified_base 83: mod_base = cm
  modified_base 84: mod_base = gm
  modified_base 85: mod_base = um
  modified_base 86: mod_base = OTHER; note = 2'-O-methyl-adenosine
  modified_base 87: mod_base = OTHER; note = 2'-O-methyl-adenosine
  modified_base 88: mod_base = gm
  modified_base 89: mod_base = OTHER; note = 2'-O-methyl-adenosine
  modified_base 90: mod_base = gm
  modified_base 91: mod_base = gm
  modified_base 92: mod_base = cm
  modified_base 117: mod_base = OTHER; note = any 2'-O-methyl ribonucelotide
  modified_base 117..119: mod_base = OTHER; note = nucleotides linked via phosphorothioate
  modified_base 118: mod_base = OTHER; note = any 2'-O-methyl ribonucelotide
  modified_base 119: mod_base = OTHER; note = any 2'-O-methyl ribonucelotide
  source 1..119: mol_type = other RNA

SEQ ID NO: 13765 - RNA, 119 nt, synthetic construct; identical to SEQ ID NO: 13758
  modified_base 1..4: mod_base = OTHER; note = nucleotides linked via phosphorothioate
  modified_base 1: mod_base = OTHER; note = 2'-O-methyl-adenosine
  modified_base 2: mod_base = cm
  modified_base 3: mod_base = um
  modified_base 6: mod_base = cm
  modified_base 8: mod_base = cm
  modified_base 9: mod_base = um
  modified_base 14: mod_base = um
  modified_base 15: mod_base = cm
  modified_base 27: mod_base = OTHER; note = 2'-O-methyl-adenosine
  modified_base 28: mod_base = gm
  modified_base 33: mod_base = OTHER; note = 2'-O-methyl-adenosine
  modified_base 34: mod_base = um
  modified_base 35: mod_base = cm
  modified_base 36: mod_base = OTHER; note = 2'-O-methyl-adenosine
  modified_base 37: mod_base = cm
  modified_base 42: mod_base = gm
  modified_base 43: mod_base = OTHER; note = 2'-O-methyl-adenosine
  modified_base 44: mod_base = cm
  modified_base 45: mod_base = um
  modified_base 48: mod_base = gm
  modified_base 49: mod_base = um
  modified_base 50: mod_base = cm
  modified_base 51: mod_base = gm
  modified_base 58: mod_base = gm
  modified_base 59: mod_base = um
  modified_base 60: mod_base = OTHER; note = 2'-O-methyl-adenosine
  modified_base 61: mod_base = OTHER; note = 2'-O-methyl-adenosine
  modified_base 63: mod_base = gm
  modified_base 64: mod_base = cm
  modified_base 65: mod_base = cm
  modified_base 66: mod_base = gm
  modified_base 67: mod_base = cm
  modified_base 68: mod_base = um
  modified_base 69: mod_base = um
  modified_base 70: mod_base = OTHER; note = 2'-O-methyl-adenosine
  modified_base 71: mod_base = cm
  modified_base 72: mod_base = gm
  modified_base 73: mod_base = gm
  modified_base 74: mod_base = OTHER; note = 2'-O-methyl-adenosine
  modified_base 75: mod_base = cm
  modified_base 76: mod_base = um
  modified_base 77: mod_base = um
  modified_base 78: mod_base = cm
  modified_base 79: mod_base = gm
  modified_base 80: mod_base = gm
  modified_base 81: mod_base = um
  modified_base 82: mod_base = cm
  modified_base 83: mod_base = cm
  modified_base 84: mod_base = gm
  modified_base 85: mod_base = um
  modified_base 86: mod_base = OTHER; note = 2'-O-methyl-adenosine
  modified_base 87: mod_base = OTHER; note = 2'-O-methyl-adenosine
  modified_base 88: mod_base = gm
  modified_base 89: mod_base = OTHER; note = 2'-O-methyl-adenosine
  modified_base 90: mod_base = gm
  modified_base 91: mod_base = gm
  modified_base 92: mod_base = cm
  modified_base 93: mod_base = OTHER; note = 2'-O-methyl-adenosine
  modified_base 94: mod_base = um
  modified_base 116..119: mod_base = OTHER; note = nucleotides linked via phosphorothioate
  modified_base 117: mod_base = OTHER; note = any 2'-O-methyl ribonucelotide
  modified_base 118: mod_base = OTHER; note = any 2'-O-methyl ribonucelotide
  modified_base 119: mod_base = OTHER; note = any 2'-O-methyl ribonucelotide
  source 1..119: mol_type = other RNA

SEQ ID NO: 13766 - RNA, 119 nt, synthetic construct; identical to SEQ ID NO: 13758
  modified_base 1..4: mod_base = OTHER; note = nucleotides linked via phosphorothioate
  modified_base 1: mod_base = OTHER; note = 2'-O-methyl-adenosine
  modified_base 2: mod_base = cm
  modified_base 3: mod_base = um
  modified_base 33: mod_base = OTHER; note = 2'-O-methyl-adenosine
  modified_base 34: mod_base = um
  modified_base 35: mod_base = cm
  modified_base 36: mod_base = OTHER; note = 2'-O-methyl-adenosine
  modified_base 37: mod_base = cm
  modified_base 42: mod_base = gm
  modified_base 43: mod_base = OTHER; note = 2'-O-methyl-adenosine
  modified_base 44: mod_base = cm
  modified_base 45: mod_base = um
  modified_base 48: mod_base = gm
  modified_base 49: mod_base = um
  modified_base 50: mod_base = cm
  modified_base 51: mod_base = gm
  modified_base 58: mod_base = gm
  modified_base 59: mod_base = um
  modified_base 60: mod_base = OTHER; note = 2'-O-methyl-adenosine
  modified_base 61: mod_base = OTHER; note = 2'-O-methyl-adenosine
  modified_base 63: mod_base = gm
  modified_base 64: mod_base = cm
  modified_base 65: mod_base = cm
  modified_base 66: mod_base = gm
  modified_base 67: mod_base = cm
  modified_base 68: mod_base = um
  modified_base 69: mod_base = um
  modified_base 70: mod_base = OTHER; note = 2'-O-methyl-adenosine
  modified_base 71: mod_base = cm
  modified_base 72: mod_base = gm
  modified_base 73: mod_base = gm
  modified_base 74: mod_base = OTHER; note = 2'-O-methyl-adenosine
  modified_base 75: mod_base = cm
  modified_base 76: mod_base = um
  modified_base 77: mod_base = um
  modified_base 78: mod_base = cm
  modified_base 79: mod_base = gm
  modified_base 80: mod_base = gm
  modified_base 81: mod_base = um
  modified_base 82: mod_base = cm
  modified_base 83: mod_base = cm
  modified_base 84: mod_base = gm
  modified_base 85: mod_base = um
  modified_base 86: mod_base = OTHER; note = 2'-O-methyl-adenosine
  modified_base 87: mod_base = OTHER; note = 2'-O-methyl-adenosine
  modified_base 88: mod_base = gm
  modified_base 89: mod_base = OTHER; note = 2'-O-methyl-adenosine
  modified_base 90: mod_base = gm
  modified_base 91: mod_base = gm
  modified_base 92: mod_base = cm
  modified_base 93: mod_base = OTHER; note = 2'-O-methyl-adenosine
  modified_base 94: mod_base = um
  modified_base 116..119: mod_base = OTHER; note = nucleotides linked via phosphorothioate
  modified_base 117: mod_base = OTHER; note = any 2'-O-methyl ribonucelotide
  modified_base 118: mod_base = OTHER; note = any 2'-O-methyl ribonucelotide
  modified_base 119: mod_base = OTHER; note = any 2'-O-methyl ribonucelotide
  source 1..119: mol_type = other RNA

SEQ ID NO: 13767 - RNA, 119 nt, synthetic construct; identical to SEQ ID NO: 13758
  modified_base 1..4: mod_base = OTHER; note = nucleotides linked via phosphorothioate
  modified_base 1: mod_base = OTHER; note = 2'-O-methyl-adenosine
  modified_base 2: mod_base = cm
  modified_base 3: mod_base = um
  modified_base 6: mod_base = cm
  modified_base 8: mod_base = cm
  modified_base 9: mod_base = um
  modified_base 14: mod_base = um
  modified_base 15: mod_base = cm
  modified_base 27: mod_base = OTHER; note = 2'-O-methyl-adenosine
  modified_base 28: mod_base = gm
  modified_base 42: mod_base = gm
  modified_base 43: mod_base = OTHER; note = 2'-O-methyl-adenosine
  modified_base 44: mod_base = cm
  modified_base 45: mod_base = um
  modified_base 48: mod_base = gm
  modified_base 49: mod_base = um
  modified_base 50: mod_base = cm
  modified_base 51: mod_base = gm
  modified_base 63: mod_base = gm
  modified_base 64: mod_base = cm
  modified_base 65: mod_base = cm
  modified_base 66: mod_base = gm
  modified_base 67: mod_base = cm
  modified_base 68: mod_base = um
  modified_base 69: mod_base = um
  modified_base 70: mod_base = OTHER; note = 2'-O-methyl-adenosine
  modified_base 71: mod_base = cm
  modified_base 72: mod_base = gm
  modified_base 73: mod_base = gm
  modified_base 74: mod_base = OTHER; note = 2'-O-methyl-adenosine
  modified_base 75: mod_base = cm
  modified_base 76: mod_base = um
  modified_base 77: mod_base = um
  modified_base 78: mod_base = cm
  modified_base 79: mod_base = gm
  modified_base 80: mod_base = gm
  modified_base 81: mod_base = um
  modified_base 82: mod_base = cm
  modified_base 83: mod_base = cm
  modified_base 84: mod_base = gm
  modified_base 85: mod_base = um
  modified_base 86: mod_base = OTHER; note = 2'-O-methyl-adenosine
  modified_base 87: mod_base = OTHER; note = 2'-O-methyl-adenosine
  modified_base 88: mod_base = gm
  modified_base 89: mod_base = OTHER; note = 2'-O-methyl-adenosine
  modified_base 90: mod_base = gm
  modified_base 91: mod_base = gm
  modified_base 92: mod_base = cm
  modified_base 116..119: mod_base = OTHER; note = nucleotides linked via phosphorothioate
  modified_base 117: mod_base = OTHER; note = any 2'-O-methyl ribonucelotide
  modified_base 118: mod_base = OTHER; note = any 2'-O-methyl ribonucelotide
  modified_base 119: mod_base = OTHER; note = any 2'-O-methyl ribonucelotide
  source 1..119: mol_type = other RNA

SEQ ID NO: 13768 - RNA, 109 nt, synthetic construct
  source 1..109: mol_type = other RNA
actggcgcttctatctgattactctgagcgccatcaccagcgactatgtcgtagtgggtaaagctccctcttcggagggagcatcagagnnnnnnnnnnnnnnnnnnnn

SEQ ID NO: 13769 - RNA, 109 nt, synthetic construct; identical to SEQ ID NO: 13768
  modified_base 1..4: mod_base = OTHER; note = nucleotides linked via phosphorothioate
  modified_base 1: mod_base = OTHER; note = 2'-O-methyl-adenosine
  modified_base 2: mod_base = cm
  modified_base 3: mod_base = um
  modified_base 106..109: mod_base = OTHER; note = nucleotides linked via phosphorothioate
  modified_base 107: mod_base = OTHER; note = any 2'-O-methyl ribonucelotide
  modified_base 108: mod_base = OTHER; note = any 2'-O-methyl ribonucelotide
  modified_base 109: mod_base = OTHER; note = any 2'-O-methyl ribonucelotide
  source 1..109: mol_type = other RNA

SEQ ID NO: 13770 - RNA, 112 nt, synthetic construct
  modified_base 1..4: mod_base = OTHER; note = nucleotides linked via phosphorothioate
  modified_base 1: mod_base = OTHER; note = 2'-O-methyl-adenosine
  modified_base 2: mod_base = cm
  modified_base 3: mod_base = um
  modified_base 109..112: mod_base = OTHER; note = nucleotides linked via phosphorothioate
  modified_base 110: mod_base = um
  modified_base 111: mod_base = um
  modified_base 112: mod_base = um
  source 1..112: mol_type = other RNA
actggcgcttctatctgattactctgagcgccatcaccagcgactatgtcgtagtgggtaaagctccctcttcggagggagcatcagagnnnnnnnnnnnnnnnnnnnnttt

SEQ ID NO: 13771 - RNA, 109 nt, synthetic construct; identical to SEQ ID NO: 13768
  modified_base 1..4: mod_base = OTHER; note = nucleotides linked via phosphorothioate
  modified_base 1: mod_base = OTHER; note = 2'-O-methyl-adenosine
  modified_base 2: mod_base = cm
  modified_base 3: mod_base = um
  modified_base 4: mod_base = gm
  modified_base 5: mod_base = gm
  modified_base 6: mod_base = cm
  modified_base 7: mod_base = gm
  modified_base 8: mod_base = cm
  modified_base 9: mod_base = um
  modified_base 10: mod_base = um
  modified_base 11: mod_base = cm
  modified_base 12: mod_base = um
  modified_base 13: mod_base = OTHER; note = 2'-O-methyl-adenosine
  modified_base 14: mod_base = um
  modified_base 15: mod_base = cm
  modified_base 16: mod_base = um
  modified_base 17: mod_base = gm
  modified_base 18: mod_base = OTHER; note = 2'-O-methyl-adenosine
  modified_base 19: mod_base = um
  modified_base 27: mod_base = OTHER; note = 2'-O-methyl-adenosine
  modified_base 28: mod_base = gm
  modified_base 29: mod_base = cm
  modified_base 30: mod_base = gm
  modified_base 31: mod_base = cm
  modified_base 32: mod_base = cm
  modified_base 33: mod_base = OTHER; note = 2'-O-methyl-adenosine
  modified_base 34: mod_base = um
  modified_base 35: mod_base = cm
  modified_base 36: mod_base = OTHER; note = 2'-O-methyl-adenosine
  modified_base 37: mod_base = cm
  modified_base 38: mod_base = cm
  modified_base 44: mod_base = cm
  modified_base 45: mod_base = um
  modified_base 48: mod_base = gm
  modified_base 49: mod_base = um
  modified_base 50: mod_base = cm
  modified_base 51: mod_base = gm
  modified_base 57: mod_base = gm
  modified_base 58: mod_base = gm
  modified_base 59: mod_base = um
  modified_base 60: mod_base = OTHER; note = 2'-O-methyl-adenosine
  modified_base 61: mod_base = OTHER; note = 2'-O-methyl-adenosine
  modified_base 62: mod_base = OTHER; note = 2'-O-methyl-adenosine
  modified_base 63: mod_base = gm
  modified_base 64: mod_base = cm
  modified_base 65: mod_base = um
  modified_base 66: mod_base = cm
  modified_base 67: mod_base = cm
  modified_base 68: mod_base = cm
  modified_base 69: mod_base = um
  modified_base 70: mod_base = cm
  modified_base 71: mod_base = um
  modified_base 72: mod_base = um
  modified_base 73: mod_base = cm
  modified_base 74: mod_base = gm
  modified_base 75: mod_base = gm
  modified_base 76: mod_base = OTHER; note = 2'-O-methyl-adenosine
  modified_base 77: mod_base = gm
  modified_base 78: mod_base = gm
  modified_base 79: mod_base = gm
  modified_base 80: mod_base = OTHER; note = 2'-O-methyl-adenosine
  modified_base 81: mod_base = gm
  modified_base 82: mod_base = cm
  modified_base 83: mod_base = OTHER; note = 2'-O-methyl-adenosine
  modified_base 84: mod_base = um
  modified_base 85: mod_base = cm
  modified_base 86: mod_base = OTHER; note = 2'-O-methyl-adenosine
  modified_base 106..109: mod_base = OTHER; note = nucleotides linked via phosphorothioate
  modified_base 107: mod_base = OTHER; note = any 2'-O-methyl ribonucelotide
  modified_base 108: mod_base = OTHER; note = any 2'-O-methyl ribonucelotide
  modified_base 109: mod_base = OTHER; note = any 2'-O-methyl ribonucelotide
  source 1..109: mol_type = other RNA

SEQ ID NO: 13772 - RNA, 109 nt, synthetic construct; identical to SEQ ID NO: 13768
  modified_base 1..4: mod_base = OTHER; note = nucleotides linked via phosphorothioate
  modified_base 1: mod_base = OTHER; note = 2'-O-methyl-adenosine
  modified_base 2: mod_base = cm
  modified_base 3: mod_base = um
  modified_base 4: mod_base = gm
  modified_base 5: mod_base = gm
  modified_base 6: mod_base = cm
  modified_base 7: mod_base = gm
  modified_base 8: mod_base = cm
  modified_base 13: mod_base = OTHER; note = 2'-O-methyl-adenosine
  modified_base 14: mod_base = um
  modified_base 15: mod_base = cm
  modified_base 16: mod_base = um
  modified_base 17: mod_base = gm
  modified_base 18: mod_base = OTHER; note = 2'-O-methyl-adenosine
  modified_base 19: mod_base = um
  modified_base 27: mod_base = OTHER; note = 2'-O-methyl-adenosine
  modified_base 28: mod_base = gm
  modified_base 29: mod_base = cm
  modified_base 30: mod_base = gm
  modified_base 31: mod_base = cm
  modified_base 32: mod_base = cm
  modified_base 33: mod_base = OTHER; note = 2'-O-methyl-adenosine
  modified_base 34: mod_base = um
  modified_base 35: mod_base = cm
  modified_base 36: mod_base = OTHER; note = 2'-O-methyl-adenosine
  modified_base 37: mod_base = cm
  modified_base 38: mod_base = cm
  modified_base 44: mod_base = cm
  modified_base 45: mod_base = um
  modified_base 48: mod_base = gm
  modified_base 49: mod_base = um
  modified_base 50: mod_base = cm
  modified_base 51: mod_base = gm
  modified_base 57: mod_base = gm
  modified_base 58: mod_base = gm
  modified_base 59: mod_base = um
  modified_base 60: mod_base = OTHER; note = 2'-O-methyl-adenosine
  modified_base 61: mod_base = OTHER; note = 2'-O-methyl-adenosine
  modified_base 62: mod_base = OTHER; note = 2'-O-methyl-adenosine
  modified_base 63: mod_base = gm
  modified_base 64: mod_base = cm
  modified_base 65: mod_base = um
  modified_base 66: mod_base = cm
  modified_base 67: mod_base = cm
  modified_base 68: mod_base = cm
  modified_base 69: mod_base = um
  modified_base 70: mod_base = cm
  modified_base 71: mod_base = um
  modified_base 72: mod_base = um
  modified_base 73: mod_base = cm
  modified_base 74: mod_base = gm
  modified_base 75: mod_base = gm
  modified_base 76: mod_base = OTHER; note = 2'-O-methyl-adenosine
  modified_base 77: mod_base = gm
  modified_base 78: mod_base = gm
  modified_base 79: mod_base = gm
  modified_base 80: mod_base = OTHER; note = 2'-O-methyl-adenosine
  modified_base 81: mod_base = gm
  modified_base 82: mod_base = cm
  modified_base 83: mod_base = OTHER; note = 2'-O-methyl-adenosine
  modified_base 84: mod_base = um
  modified_base 106..109: mod_base = OTHER; note = nucleotides linked via phosphorothioate
  modified_base 107: mod_base = OTHER; note = any 2'-O-methyl ribonucelotide
  modified_base 108: mod_base = OTHER; note = any 2'-O-methyl ribonucelotide
  modified_base 109: mod_base = OTHER; note = any 2'-O-methyl ribonucelotide
  source 1..109: mol_type = other RNA

SEQ ID NO: 13773 - RNA, 109 nt, synthetic construct; identical to SEQ ID NO: 13768
  modified_base 1..4: mod_base = OTHER; note = nucleotides linked via phosphorothioate
  modified_base 1: mod_base = OTHER; note = 2'-O-methyl-adenosine
  modified_base 2: mod_base = cm
  modified_base 3: mod_base = um
  modified_base 44: mod_base = cm
  modified_base 45: mod_base = um
  modified_base 48: mod_base = gm
  modified_base 49: mod_base = um
  modified_base 50: mod_base = cm
  modified_base 51: mod_base = gm
  modified_base 63: mod_base = gm
  modified_base 64: mod_base = cm
  modified_base 65: mod_base = um
  modified_base 66: mod_base = cm
  modified_base 67: mod_base = cm
  modified_base 68: mod_base = cm
  modified_base 69: mod_base = um
  modified_base 70: mod_base = cm
  modified_base 71: mod_base = um
  modified_base 72: mod_base = um
  modified_base 73: mod_base = cm
  modified_base 74: mod_base = gm
  modified_base 75: mod_base = gm
  modified_base 76: mod_base = OTHER; note = 2'-O-methyl-adenosine
  modified_base 77: mod_base = gm
  modified_base 78: mod_base = gm
  modified_base 79: mod_base = gm
  modified_base 80: mod_base = OTHER; note = 2'-O-methyl-adenosine
  modified_base 81: mod_base = gm
  modified_base 82: mod_base = cm
  modified_base 106..109: mod_base = OTHER; note = nucleotides linked via phosphorothioate
  modified_base 107: mod_base = OTHER; note = any 2'-O-methyl ribonucelotide
  modified_base 108: mod_base = OTHER; note = any 2'-O-methyl ribonucelotide
  modified_base 109: mod_base = OTHER; note = any 2'-O-methyl ribonucelotide
  source 1..109: mol_type = other RNA

SEQ ID NO: 13774 - RNA, 109 nt, synthetic construct; identical to SEQ ID NO: 13768
  modified_base 1..4: mod_base = OTHER; note = nucleotides linked via phosphorothioate
  modified_base 1: mod_base = OTHER; note = 2'-O-methyl-adenosine
  modified_base 2: mod_base = cm
  modified_base 3: mod_base = um
  modified_base 63: mod_base = gm
  modified_base 64: mod_base = cm
  modified_base 65: mod_base = um
  modified_base 66: mod_base = cm
  modified_base 67: mod_base = cm
  modified_base 68: mod_base = cm
  modified_base 69: mod_base = um
  modified_base 70: mod_base = cm
  modified_base 71: mod_base = um
  modified_base 72: mod_base = um
  modified_base 73: mod_base = cm
  modified_base 74: mod_base = gm
  modified_base 75: mod_base = gm
  modified_base 76: mod_base = OTHER; note = 2'-O-methyl-adenosine
  modified_base 77: mod_base = gm
  modified_base 78: mod_base = gm
  modified_base 79: mod_base = gm
  modified_base 80: mod_base = OTHER; note = 2'-O-methyl-adenosine
  modified_base 81: mod_base = gm
  modified_base 82: mod_base = cm
  modified_base 106..109: mod_base = OTHER; note = nucleotides linked via phosphorothioate
  modified_base 107: mod_base = OTHER; note = any 2'-O-methyl ribonucelotide
  modified_base 108: mod_base = OTHER; note = any 2'-O-methyl ribonucelotide
  modified_base 109: mod_base = OTHER; note = any 2'-O-methyl ribonucelotide
  source 1..109: mol_type = other RNA

SEQ ID NO: 13775 - RNA, 109 nt, synthetic construct; identical to SEQ ID NO: 13768
  modified_base 1..4: mod_base = OTHER; note = nucleotides linked via phosphorothioate
  modified_base 1: mod_base = OTHER; note = 2'-O-methyl-adenosine
  modified_base 2: mod_base = cm
  modified_base 3: mod_base = um
  modified_base 6: mod_base = cm
  modified_base 8: mod_base = cm
  modified_base 9: mod_base = um
  modified_base 14: mod_base = um
  modified_base 15: mod_base = cm
  modified_base 27: mod_base = OTHER; note = 2'-O-methyl-adenosine
  modified_base 28: mod_base = gm
  modified_base 33: mod_base = OTHER; note = 2'-O-methyl-adenosine
  modified_base 34: mod_base = um
  modified_base 35: mod_base = cm
  modified_base 36: mod_base = OTHER; note = 2'-O-methyl-adenosine
  modified_base 37: mod_base = cm
  modified_base 42: mod_base = gm
  modified_base 43: mod_base = OTHER; note = 2'-O-methyl-adenosine
  modified_base 44: mod_base = cm
  modified_base 45: mod_base = um
  modified_base 48: mod_base = gm
  modified_base 49: mod_base = um
  modified_base 50: mod_base = cm
  modified_base 51: mod_base = gm
  modified_base 58: mod_base = gm
  modified_base 59: mod_base = um
  modified_base 60: mod_base = OTHER; note = 2'-O-methyl-adenosine
  modified_base 61: mod_base = OTHER; note = 2'-O-methyl-adenosine
  modified_base 63: mod_base = gm
  modified_base 64: mod_base = cm
  modified_base 65: mod_base = um
  modified_base 66: mod_base = cm
  modified_base 67: mod_base = cm
  modified_base 68: mod_base = cm
  modified_base 69: mod_base = um
  modified_base 70: mod_base = cm
  modified_base 71: mod_base = um
  modified_base 72: mod_base = um
  modified_base 73: mod_base = cm
  modified_base 74: mod_base = gm
  modified_base 75: mod_base = gm
  modified_base 76: mod_base = OTHER; note = 2'-O-methyl-adenosine
  modified_base 77: mod_base = gm
  modified_base 78: mod_base = gm
  modified_base 79: mod_base = gm
  modified_base 80: mod_base = OTHER; note = 2'-O-methyl-adenosine
  modified_base 81: mod_base = gm
  modified_base 82: mod_base = cm
  modified_base 83: mod_base = OTHER; note = 2'-O-methyl-adenosine
  modified_base 84: mod_base = um
  modified_base 106..109: mod_base = OTHER; note = nucleotides linked via phosphorothioate
  modified_base 107: mod_base = OTHER; note = any 2'-O-methyl ribonucelotide
  modified_base 108: mod_base = OTHER; note = any 2'-O-methyl ribonucelotide
  modified_base 109: mod_base = OTHER; note = any 2'-O-methyl ribonucelotide
  source 1..109: mol_type = other RNA

SEQ ID NO: 13776 - RNA, 109 nt, synthetic construct; identical to SEQ ID NO: 13768
  modified_base 1..4: mod_base = OTHER; note = nucleotides linked via phosphorothioate
  modified_base 1: mod_base = OTHER; note = 2'-O-methyl-adenosine
  modified_base 2: mod_base = cm
  modified_base 3: mod_base = um
  modified_base 33: mod_base = OTHER; note = 2'-O-methyl-adenosine
  modified_base 34: mod_base = um
  modified_base 35: mod_base = cm
  modified_base 36: mod_base = OTHER; note = 2'-O-methyl-adenosine
  modified_base 37: mod_base = cm
  modified_base 42: mod_base = gm
  modified_base 43: mod_base = OTHER; note = 2'-O-methyl-adenosine
  modified_base 44: mod_base = cm
  modified_base 45: mod_base = um
  modified_base 48: mod_base = gm
  modified_base 49: mod_base = um
  modified_base 50: mod_base = cm
  modified_base 51: mod_base = gm
  modified_base 58: mod_base = gm
  modified_base 59: mod_base = um
  modified_base 60: mod_base = OTHER; note = 2'-O-methyl-adenosine
  modified_base 61: mod_base = OTHER; note = 2'-O-methyl-adenosine
  modified_base 63: mod_base = gm
  modified_base 64: mod_base = cm
  modified_base 65: mod_base = um
  modified_base 66: mod_base = cm
  modified_base 67: mod_base = cm
  modified_base 68: mod_base = cm
  modified_base 69: mod_base = um
  modified_base 70: mod_base = cm
  modified_base 71: mod_base = um
  modified_base 72: mod_base = um
  modified_base 73: mod_base = cm
  modified_base 74: mod_base = gm
  modified_base 75: mod_base = gm
  modified_base 76: mod_base = OTHER; note = 2'-O-methyl-adenosine
  modified_base 77: mod_base = gm
  modified_base 78: mod_base = gm
  modified_base 79: mod_base = gm
  modified_base 80: mod_base = OTHER; note = 2'-O-methyl-adenosine
  modified_base 81: mod_base = gm
  modified_base 82: mod_base = cm
  modified_base 83: mod_base = OTHER; note = 2'-O-methyl-adenosine
  modified_base 84: mod_base = um
  modified_base 106..109: mod_base = OTHER; note = nucleotides linked via phosphorothioate
  modified_base 107: mod_base = OTHER; note = any 2'-O-methyl ribonucelotide
  modified_base 108: mod_base = OTHER; note = any 2'-O-methyl ribonucelotide
  modified_base 109: mod_base = OTHER; note = any 2'-O-methyl ribonucelotide
  source 1..109: mol_type = other RNA

SEQ ID NO: 13777 - RNA, 109 nt, synthetic construct; identical to SEQ ID NO: 13768
  modified_base 1..4: mod_base = OTHER; note = nucleotides linked via phosphorothioate
  modified_base 1: mod_base = OTHER; note = 2'-O-methyl-adenosine
  modified_base 2: mod_base = cm
  modified_base 3: mod_base = um
  modified_base 6: mod_base = cm
  modified_base 8: mod_base = cm
  modified_base 9: mod_base = um
  modified_base 14: mod_base = um
  modified_base 15: mod_base = cm
  modified_base 27: mod_base = OTHER; note = 2'-O-methyl-adenosine
  modified_base 28: mod_base = gm
  modified_base 42: mod_base = gm
  modified_base 43: mod_base = OTHER; note = 2'-O-methyl-adenosine
  modified_base 44: mod_base = cm
  modified_base 45: mod_base = um
  modified_base 48: mod_base = gm
  modified_base 49: mod_base = um
  modified_base 50: mod_base = cm
  modified_base 51: mod_base = gm
  modified_base 63: mod_base = gm
  modified_base 64: mod_base = cm
  modified_base 65: mod_base = um
  modified_base 66: mod_base = cm
  modified_base 67: mod_base = cm
  modified_base 68: mod_base = cm
  modified_base 69: mod_base = um
  modified_base 70: mod_base = cm
  modified_base 71: mod_base = um
  modified_base 72: mod_base = um
  modified_base 73: mod_base = cm
  modified_base 74: mod_base = gm
  modified_base 75: mod_base = gm
  modified_base 76: mod_base = OTHER; note = 2'-O-methyl-adenosine
  modified_base 77: mod_base = gm
  modified_base 78: mod_base = gm
  modified_base 79: mod_base = gm
  modified_base 80: mod_base = OTHER; note = 2'-O-methyl-adenosine
  modified_base 81: mod_base = gm
  modified_base 82: mod_base = cm
  modified_base 106..109: mod_base = OTHER; note = nucleotides linked via phosphorothioate
  modified_base 107: mod_base = OTHER; note = any 2'-O-methyl ribonucelotide
  modified_base 108: mod_base = OTHER; note = any 2'-O-methyl ribonucelotide
  modified_base 109: mod_base = OTHER; note = any 2'-O-methyl ribonucelotide
  source 1..109: mol_type = other RNA

SEQ ID NO: 13778 - DNA, 130 bp, synthetic construct
  source 1..130: mol_type = other DNA
cctgcaggcagctgcgcgctcgctcgctcactgaggccgcccgggcgtcgggcgacctttggtcgcccggcctcagtgagcgagcgagcgcgcagagagggagtggccaactccatcactaggggttcct

SEQ ID NO: 13779 - DNA, 141 bp, synthetic construct
  source 1..141: mol_type = other DNA
aggaacccctagtgatggagttggccactccctctctgcgcgctcgctcgctcactgaggccgggcgaccaaaggtcgcccgacgcccgggctttgcccgggcggcctcagtgagcgagcgagcgcgcagctgcctgcagg

SEQ ID NO: 13780 - DNA, 129 bp, synthetic construct
  source 1..129: mol_type = other DNA
tgctcactcactcactcactgaggcctgcagagcaaagctctgcagtctggggacctttggtccccaggcctcagtgagtgagtgagtgagcagagagggagtggccaactccatcactaggggttcct

SEQ ID NO: 13781 - DNA, 131 bp, synthetic construct
  source 1..131: mol_type = other DNA
tctgctcactcactcactcactgaggcctgcagagcaaagctctgcagtctggggacctttggtccccaggcctcagtgagtgagtgagtgagcagagagggagtggccaactccatcactaggggttcct

SEQ ID NO: 13782 - DNA, 20 bp, synthetic construct
  source 1..20: mol_type = other DNA
gaggaggacggcctggccga

SEQ ID NO: 13783 - DNA, 20 bp, synthetic construct
  source 1..20: mol_type = other DNA
accgctgcgccaaggtgcgg

SEQ ID NO: 13784 - DNA, 20 bp, synthetic construct
  source 1..20: mol_type = other DNA
gccaggccgtcctcctcgga

SEQ ID NO: 13785 - DNA, 20 bp, synthetic construct
  source 1..20: mol_type = other DNA
gtgctcgggtgcttcggcca

SEQ ID NO: 13786 - DNA, 20 bp, synthetic construct
  source 1..20: mol_type = other DNA
atggccttcttcctggcttc

SEQ ID NO: 13787 - DNA, 20 bp, synthetic construct
  source 1..20: mol_type = other DNA
gcaccaccacgtaggtgcca

SEQ ID NO: 13788 - DNA, 20 bp, synthetic construct
  source 1..20: mol_type = other DNA
tcctggcttcctggtgaaga

SEQ ID NO: 13789 - DNA, 20 bp, synthetic construct
  source 1..20: mol_type = other DNA
tggcttcctggtgaagatga

SEQ ID NO: 13790 - DNA, 20 bp, synthetic construct
  source 1..20: mol_type = other DNA
tccttgcatggggccaggat

SEQ ID NO: 13791 - DNA, 20 bp, synthetic construct
  source 1..20: mol_type = other DNA
gcctcgccctccccagacag

SEQ ID NO: 13792 - DNA, 20 bp, synthetic construct
  source 1..20: mol_type = other DNA
gatggggctcggggtggcgt

SEQ ID NO: 13793 - DNA, 20 bp, synthetic construct
  source 1..20: mol_type = other DNA
ggggtgtgggtactggacgc

SEQ ID NO: 13794 - DNA, 20 bp, synthetic construct
  source 1..20: mol_type = other DNA
cgtggacgcgcaggctgccg

SEQ ID NO: 13795 - DNA, 20 bp, synthetic construct
  source 1..20: mol_type = other DNA
gaggctagaggactgagcca

SEQ ID NO: 13796 - DNA, 20 bp, synthetic construct
  source 1..20: mol_type = other DNA
cgaggccgcgcgcacctctc

SEQ ID NO: 13797 - DNA, 20 bp, synthetic construct
  source 1..20: mol_type = other DNA
taatctccatcctcgtcctg

SEQ ID NO: 13798 - RNA, 20 nt, synthetic construct
  source 1..20: mol_type = other RNA
gcctcgccctccccagacag

SEQ ID NO: 13799 - RNA, 20 nt, synthetic construct
  source 1..20: mol_type = other RNA
gatggggctcggggtggcgt

SEQ ID NO: 13800 - RNA, 20 nt, synthetic construct
  source 1..20: mol_type = other RNA
ggggtgtgggtactggacgc

SEQ ID NO: 13801 - RNA, 20 nt, synthetic construct
  source 1..20: mol_type = other RNA
cgtggacgcgcaggctgccg

SEQ ID NO: 13802 - RNA, 20 nt, synthetic construct
  source 1..20: mol_type = other RNA
gaggctagaggactgagcca

SEQ ID NO: 13803 - RNA, 20 nt, synthetic construct
  source 1..20: mol_type = other RNA
cgaggccgcgcgcacctctc

SEQ ID NO: 13804 - RNA, 20 nt, synthetic construct
  source 1..20: mol_type = other RNA
taatctccatcctcgtcctg

SEQ ID NO: 13805 - DNA, 20 bp, synthetic construct
  source 1..20: mol_type = other DNA
ctacacccgcaccttggcgc

SEQ ID NO: 13806 - DNA, 20 bp, synthetic construct
  source 1..20: mol_type = other DNA
ccggcgggcagcctgggcct

SEQ ID NO: 13807 - DNA, 20 bp, synthetic construct
  source 1..20: mol_type = other DNA
tggtgaggtatccccggcgg

SEQ ID NO: 13808 - DNA, 20 bp, synthetic construct
  source 1..20: mol_type = other DNA
tcaccaggaagccaggaaga

SEQ ID NO: 13809 - DNA, 20 bp, synthetic construct
  source 1..20: mol_type = other DNA
tggtgaagatgagtggcgac

SEQ ID NO: 13810 - DNA, 20 bp, synthetic construct
  source 1..20: mol_type = other DNA
caaaaagggtggctcaccag

SEQ ID NO: 13811 - DNA, 20 bp, synthetic construct
  source 1..20: mol_type = other DNA
aggcctgcagaagccagaga

SEQ ID NO: 13812 - DNA, 20 bp, synthetic construct
  source 1..20: mol_type = other DNA
gcaggccttgaagttgcccc

SEQ ID NO: 13813 - DNA, 20 bp, synthetic construct
  source 1..20: mol_type = other DNA
aggaggactcctctgtcttt

SEQ ID NO: 13814 - DNA, 20 bp, synthetic construct
  source 1..20: mol_type = other DNA
gctccaggttccacgggatg

SEQ ID NO: 13815 - DNA, 20 bp, synthetic construct
  source 1..20: mol_type = other DNA
gcccggtaccgtggaggggt

SEQ ID NO: 13816 - DNA, 20 bp, synthetic construct
  source 1..20: mol_type = other DNA
tccgcccggtaccgtggagg

SEQ ID NO: 13817 - DNA, 20 bp, synthetic construct
  source 1..20: mol_type = other DNA
aaggcgacatttgtgggaga

SEQ ID NO: 13818 - DNA, 20 bp, synthetic construct
  source 1..20: mol_type = other DNA
cggtggtcactctgtatgct

SEQ ID NO: 13819 - DNA, 20 bp, synthetic construct
  source 1..20: mol_type = other DNA
cgaagtcggtgaccatgacc

SEQ ID NO: 13820 - DNA, 20 bp, synthetic construct
  source 1..20: mol_type = other DNA
agaatgtgcccgaggaggac

SEQ ID NO: 13821 - DNA, 20 bp, synthetic construct
  source 1..20: mol_type = other DNA
acagacaggtaagcacggcc

SEQ ID NO: 13822 - DNA, 20 bp, synthetic construct
  source 1..20: mol_type = other DNA
catgtggtccttgtgttcgt

SEQ ID NO: 13823 - DNA, 20 bp, synthetic construct
  source 1..20: mol_type = other DNA
tcgagcaggccagcaagtgt

SEQ ID NO: 13824 - DNA, 20 bp, synthetic construct
  source 1..20: mol_type = other DNA
cttggcagttgagcacgcgc

SEQ ID NO: 13825 - DNA, 20 bp, synthetic construct
  source 1..20: mol_type = other DNA
tcccaggcctggagtttatt

SEQ ID NO: 13826 - DNA, 20 bp, synthetic construct
  source 1..20: mol_type = other DNA
gaaaagccagctggtccagc

SEQ ID NO: 13827 - DNA, 20 bp, synthetic construct
  source 1..20: mol_type = other DNA
gggacgatgcctgcctctac

SEQ ID NO: 13828 - DNA, 20 bp, synthetic construct
  source 1..20: mol_type = other DNA
gagtgaaatggcctgctctg

SEQ ID NO: 13829 - DNA, 20 bp, synthetic construct
  source 1..20: mol_type = other DNA
gagcaggccatttcactcgg

SEQ ID NO: 13830 - DNA, 20 bp, synthetic construct
  source 1..20: mol_type = other DNA
ctcggaatctgctgtgcatc

SEQ ID NO: 13831 - DNA, 20 bp, synthetic construct
  source 1..20: mol_type = other DNA
ggaagggctgtcgatactgg

SEQ ID NO: 13832 - DNA, 20 bp, synthetic construct
  source 1..20: mol_type = other DNA
cctttgtttcttcccagtat

SEQ ID NO: 13833 - DNA, 20 bp, synthetic construct
  source 1..20: mol_type = other DNA
tcccagtatcgacagccctt

SEQ ID NO: 13834 - DNA, 20 bp, synthetic construct
  source 1..20: mol_type = other DNA
cagtatcgacagcccttcca

SEQ ID NO: 13835 - DNA, 20 bp, synthetic construct
  source 1..20: mol_type = other DNA
agaaagagcaagcctcatgt

SEQ ID NO: 13836 - DNA, 20 bp, synthetic construct
  source 1..20: mol_type = other DNA
ccttttcatcctcctgcctg

SEQ ID NO: 13837 - DNA, 20 bp, synthetic construct
  source 1..20: mol_type = other DNA
tcctcctgcctggtacacaa

SEQ ID NO: 13838 - DNA, 20 bp, synthetic construct
  source 1..20: mol_type = other DNA
agcccagttaggatttggga

SEQ ID NO: 13839 - DNA, 20 bp, synthetic construct
  source 1..20: mol_type = other DNA
tccctctgcgcgtaatctga

SEQ ID NO: 13840 - DNA, 20 bp, synthetic construct
  source 1..20: mol_type = other DNA
ctctgcgcgtaatctgacgc

SEQ ID NO: 13841 - DNA, 20 bp, synthetic construct
  source 1..20: mol_type = other DNA
agggtgtgggtgcttgacgc

SEQ ID NO: 13842 - DNA, 20 bp, synthetic construct
  source 1..20: mol_type = other DNA
gcagcgacgtcgaggcgctc

SEQ ID NO: 13843 - DNA, 20 bp, synthetic construct
  source 1..20: mol_type = other DNA
gttcagggtctgagcctgga

SEQ ID NO: 13844 - DNA, 20 bp, synthetic construct
  source 1..20: mol_type = other DNA
gggtctgagcctggaggagt

SEQ ID NO: 13845 - DNA, 20 bp, synthetic construct
  source 1..20: mol_type = other DNA
ggagcagggcgcgtgaaggg

SEQ ID NO: 13846 - DNA, 20 bp, synthetic construct
  source 1..20: mol_type = other DNA
cgcgccctgctcctgaactt

SEQ ID NO: 13847 - DNA, 20 bp, synthetic construct
  source 1..20: mol_type = other DNA
gctcctgcacagtcctcccc

SEQ ID NO: 13848 - DNA, 20 bp, synthetic construct
  source 1..20: mol_type = other DNA
cctagacaccagcatacaga

SEQ ID NO: 13849 - DNA, 20 bp, synthetic construct
  source 1..20: mol_type = other DNA
ccatcctggaggtgggtggg

SEQ ID NO: 13850 - DNA, 20 bp, synthetic construct
  source 1..20: mol_type = other DNA
ggaagtgccattcccaaaaa

SEQ ID NO: 13851 - DNA, 20 bp, synthetic construct
  source 1..20: mol_type = other DNA
ccccggcctcccatccctac

SEQ ID NO: 13852 - DNA, 20 bp, synthetic construct
  source 1..20: mol_type = other DNA
tccatgtcatcatgttcctc

SEQ ID NO: 13853 - DNA, 20 bp, synthetic construct
  source 1..20: mol_type = other DNA
atgtcatcatgttcctcctt

SEQ ID NO: 13854 - DNA, 20 bp, synthetic construct
  source 1..20: mol_type = other DNA
tgatagggctgggccactgc

SEQ ID NO: 13855 - DNA, 20 bp, synthetic construct
  source 1..20: mol_type = other DNA
gcaatgggcctactaagcac

SEQ ID NO: 13856 - DNA, 20 bp, synthetic construct
  source 1..20: mol_type = other DNA
gctcagatggggtggggcag

SEQ ID NO: 13857 - DNA, 20 bp, synthetic construct
  source 1..20: mol_type = other DNA
gtgtgttaactataaggttg

SEQ ID NO: 13858 - DNA, 20 bp, synthetic construct
  source 1..20: mol_type = other DNA
ctcctctcccacaaatgtcg

SEQ ID NO: 13859 - DNA, 20 bp, synthetic construct
  source 1..20: mol_type = other DNA
tccatccagccacctgctga

SEQ ID NO: 13860 - DNA, 20 bp, synthetic construct
  source 1..20: mol_type = other DNA
aggtcatcacagttggggcc

SEQ ID NO: 13861 - DNA, 20 bp, synthetic construct
  source 1..20: mol_type = other DNA
cccctgcaccaggcattgca

SEQ ID NO: 13862 - DNA, 20 bp, synthetic construct
  source 1..20: mol_type = other DNA
ctgccaaagatgtcatcaat

SEQ ID NO: 13863 - DNA, 20 bp, synthetic construct
  source 1..20: mol_type = other DNA
ctgaggaccagcgggtactg

SEQ ID NO: 13864 - DNA, 20 bp, synthetic construct
  source 1..20: mol_type = other DNA
gtggaggtcccctcactccc

SEQ ID NO: 13865 - DNA, 20 bp, synthetic construct
  source 1..20: mol_type = other DNA
cactcctggagaaactggag

SEQ ID NO: 13866 - DNA, 20 bp, synthetic construct
  source 1..20: mol_type = other DNA
ccaggagtgggaagcggcgg

SEQ ID NO: 13867 - DNA, 20 bp, synthetic construct
  source 1..20: mol_type = other DNA
gtgttttcaaagcccattct

SEQ ID NO: 13868 - DNA, 20 bp, synthetic construct
  source 1..20: mol_type = other DNA
aagcccattctaaagcagat

SEQ ID NO: 13869 - DNA, 20 bp, synthetic construct
  source 1..20: mol_type = other DNA
aaagcagattcccatttccg

SEQ ID NO: 13870 - DNA, 20 bp, synthetic construct
  source 1..20: mol_type = other DNA
catttccgtctttgactcta

SEQ ID NO: 13871 - DNA, 20 bp, synthetic construct
  source 1..20: mol_type = other DNA
gtctttgactctaaggccca

SEQ ID NO: 13872 - DNA, 20 bp, synthetic construct
  source 1..20: mol_type = other DNA
ccttatgcacccactgcccg

SEQ ID NO: 13873 - DNA, 20 bp, synthetic construct
  source 1..20: mol_type = other DNA
catctgagctggctttcctc

SEQ ID NO: 13874 - DNA, 20 bp, synthetic construct
  source 1..20: mol_type = other DNA
tgctgccatgccccaggtct

SEQ ID NO: 13875 - DNA, 20 bp, synthetic construct
  source 1..20: mol_type = other DNA
agacctggggcatggcagca

SEQ ID NO: 13876 - DNA, 20 bp, synthetic construct
  source 1..20: mol_type = other DNA
atgctccttgactttgcatt

SEQ ID NO: 13877 - DNA, 20 bp, synthetic construct
  source 1..20: mol_type = other DNA
tttcctcgggctctggcagg

SEQ ID NO: 13878 - DNA, 20 bp, synthetic construct
  source 1..20: mol_type = other DNA
tcgggctctggcaggtgacc

SEQ ID NO: 13879 - DNA, 20 bp, synthetic construct
  source 1..20: mol_type = other DNA
ctggtgctgcctgtagtgct

SEQ ID NO: 13880 - DNA, 20 bp, synthetic construct
  source 1..20: mol_type = other DNA
gacttgtccctctctcagcc

SEQ ID NO: 13881 - DNA, 20 bp, synthetic construct
  source 1..20: mol_type = other DNA
gcctttccggggctgctggc

SEQ ID NO: 13882 - DNA, 20 bp, synthetic construct
  source 1..20: mol_type = other DNA
aggcaaggaggctgccccac

SEQ ID NO: 13883 - DNA, 20 bp, synthetic construct
  source 1..20: mol_type = other DNA
tggcacctccacctggggag

SEQ ID NO: 13884 - DNA, 20 bp, synthetic construct
  source 1..20: mol_type = other DNA
ccattcaaacaggtcgagct

SEQ ID NO: 13885 - DNA, 20 bp, synthetic construct
  source 1..20: mol_type = other DNA
aacaggtcgagctgtgctcg

SEQ ID NO: 13886 - DNA, 20 bp, synthetic construct
  source 1..20: mol_type = other DNA
gcccacggacatcggcacat

SEQ ID NO: 13887 - DNA, 20 bp, synthetic construct
  source 1..20: mol_type = other DNA
gtgccaggcattcaatcctc

SEQ ID NO: 13888 - DNA, 20 bp, synthetic construct
  source 1..20: mol_type = other DNA
atcctcaggtctccaccaag

SEQ ID NO: 13889 - DNA, 20 bp, synthetic construct
  source 1..20: mol_type = other DNA
tcccatggataggggagggg

SEQ ID NO: 13890 - DNA, 20 bp, synthetic construct
  source 1..20: mol_type = other DNA
catggataggggagggggcg

SEQ ID NO: 13891 - DNA, 20 bp, synthetic construct
  source 1..20: mol_type = other DNA
cactcaccccccaacgatgt

SEQ ID NO: 13892 - DNA, 20 bp, synthetic construct
  source 1..20: mol_type = other DNA
ccacagttagctggagatga

SEQ ID NO: 13893 - DNA, 20 bp, synthetic construct
  source 1..20: mol_type = other DNA
ggatggcatctagccagagg

SEQ ID NO: 13894 - DNA, 20 bp, synthetic construct
  source 1..20: mol_type = other DNA
tgagccacctttactctgct

SEQ ID NO: 13895 - DNA, 20 bp, synthetic construct
  source 1..20: mol_type = other DNA
tcctctgtgaagtaggggtg

SEQ ID NO: 13896 - DNA, 20 bp, synthetic construct
  source 1..20: mol_type = other DNA
aggtttcttcctctgtgaag

SEQ ID NO: 13897 - DNA, 20 bp, synthetic construct
  source 1..20: mol_type = other DNA
cagaggaagaaacctggaac

SEQ ID NO: 13898 - DNA, 20 bp, synthetic construct
  source 1..20: mol_type = other DNA
ggctcagttcctgctgtgtg

SEQ ID NO: 13899 - DNA, 20 bp, synthetic construct
  source 1..20: mol_type = other DNA
gagccagcccaatctgcgtt

SEQ ID NO: 13900 - DNA, 20 bp, synthetic construct
  source 1..20: mol_type = other DNA
tacttcacccggctgggctc

SEQ ID NO: 13901 - DNA, 20 bp, synthetic construct
  source 1..20: mol_type = other DNA
cccggctgggctcctcattt

SEQ ID NO: 13902 - DNA, 20 bp, synthetic construct
  source 1..20: mol_type = other DNA
cagcctcactgttacccgta

SEQ ID NO: 13903 - DNA, 20 bp, synthetic construct
  source 1..20: mol_type = other DNA
tggtctgtgttccccttccc

SEQ ID NO: 13904 - DNA, 20 bp, synthetic construct
  source 1..20: mol_type = other DNA
gccatcactcaccgagcttc

SEQ ID NO: 13905 - DNA, 20 bp, synthetic construct
  source 1..20: mol_type = other DNA
atgcctgcaggcatcgttct

SEQ ID NO: 13906 - DNA, 20 bp, synthetic construct
  source 1..20: mol_type = other DNA
cttggcacgatcttggggac

SEQ ID NO: 13907 - DNA, 20 bp, synthetic construct
  source 1..20: mol_type = other DNA
cactgaatagcgcagccgca

SEQ ID NO: 13908 - DNA, 20 bp, synthetic construct
  source 1..20: mol_type = other DNA
gtgggaaggttcgcggggtt

SEQ ID NO: 13909 - DNA, 20 bp, synthetic construct
  source 1..20: mol_type = other DNA
cggggttgggagacccggag

SEQ ID NO: 13910 - DNA, 20 bp, synthetic construct
  source 1..20: mol_type = other DNA
tcggcctccgggtctcccaa

SEQ ID NO: 13911 - DNA, 20 bp, synthetic construct
  source 1..20: mol_type = other DNA
cagtacgttccaggcattca

SEQ ID NO: 13912 - DNA, 20 bp, synthetic construct
  source 1..20: mol_type = other DNA
aaaccaaatcggaacccact

SEQ ID NO: 13913 - DNA, 20 bp, synthetic construct
  source 1..20: mol_type = other DNA
gatttggtttggaaaacatg

SEQ ID NO: 13914 - DNA, 20 bp, synthetic construct
  source 1..20: mol_type = other DNA
ctccaggccctccaccctcc

SEQ ID NO: 13915 - DNA, 20 bp, synthetic construct
  source 1..20: mol_type = other DNA
gataggatcgtccgatgggg

SEQ ID NO: 13916 - DNA, 20 bp, synthetic construct
  source 1..20: mol_type = other DNA
tccgatggggctctggtggc

SEQ ID NO: 13917 - DNA, 20 bp, synthetic construct
  source 1..20: mol_type = other DNA
gcgcgccccaggcgtcaagc

SEQ ID NO: 13918 - DNA, 20 bp, synthetic construct
  source 1..20: mol_type = other DNA
ggtaaggccaggctgtggct

SEQ ID NO: 13919 - DNA, 20 bp, synthetic construct
  source 1..20: mol_type = other DNA
gagctgaatccatttgctct

SEQ ID NO: 13920 - DNA, 20 bp, synthetic construct
  source 1..20: mol_type = other DNA
atttgctctgccctggcctg

SEQ ID NO: 13921 - DNA, 20 bp, synthetic construct
  source 1..20: mol_type = other DNA
agggcagggtcatggtcacc

SEQ ID NO: 13922 - DNA, 20 bp, synthetic construct
  source 1..20: mol_type = other DNA
gacggccgtgcttacctgtc

SEQ ID NO: 13923 - DNA, 20 bp, synthetic construct
  source 1..20: mol_type = other DNA
atccagccacctgctgattt

SEQ ID NO: 13924 - DNA, 20 bp, synthetic construct
  source 1..20: mol_type = other DNA
agccacctgctgatttgtta

SEQ ID NO: 13925 - DNA, 20 bp, synthetic construct
  source 1..20: mol_type = other DNA
cggccgctgaccacccctgc

SEQ ID NO: 13926 - DNA, 20 bp, synthetic construct
  source 1..20: mol_type = other DNA
cttacctatgagggtgccgc

SEQ ID NO: 13927 - DNA, 20 bp, synthetic construct
  source 1..20: mol_type = other DNA
ctctgtgcctgtaagggagg

SEQ ID NO: 13928 - DNA, 20 bp, synthetic construct
  source 1..20: mol_type = other DNA
tcccggaagttgccggcagc

SEQ ID NO: 13929 - DNA, 20 bp, synthetic construct
  source 1..20: mol_type = other DNA
cagttggggccaccaatgcc

SEQ ID NO: 13930 - DNA, 20 bp, synthetic construct
  source 1..20: mol_type = other DNA
ttggtgcctccagcgactgc

SEQ ID NO: 13931 - DNA, 20 bp, synthetic construct
  source 1..20: mol_type = other DNA
caggctgctgcccacgtggc

SEQ ID NO: 13932 - DNA, 20 bp, synthetic construct
  source 1..20: mol_type = other DNA
cggtggccgaggcagtgggg

SEQ ID NO: 13933 - DNA, 20 bp, synthetic construct
  source 1..20: mol_type = other DNA
ccatctttcaccattcaccc

SEQ ID NO: 13934 - DNA, 20 bp, synthetic construct
  source 1..20: mol_type = other DNA
ttcaccattcacccctgcac

SEQ ID NO: 13935 - DNA, 20 bp, synthetic construct
  source 1..20: mol_type = other DNA
tggctgcaatgcctggtgca

SEQ ID NO: 13936 - DNA, 20 bp, synthetic construct
  source 1..20: mol_type = other DNA
gtctctgcctcaactcggcc

SEQ ID NO: 13937 - DNA, 20 bp, synthetic construct
  source 1..20: mol_type = other DNA
ttggcagagaagtggatcag

SEQ ID NO: 13938 - DNA, 20 bp, synthetic construct
  source 1..20: mol_type = other DNA
acttctctgccaaagatgtc

SEQ ID NO: 13939 - DNA, 20 bp, synthetic construct
  source 1..20: mol_type = other DNA
atgaggcctggttccctgag

SEQ ID NO: 13940 - DNA, 20 bp, synthetic construct
  source 1..20: mol_type = other DNA
tgcttacctgccccatgggt

SEQ ID NO: 13941 - DNA, 20 bp, synthetic construct
  source 1..20: mol_type = other DNA
caggccctttttgcaggttg

SEQ ID NO: 13942 - DNA, 20 bp, synthetic construct
  source 1..20: mol_type = other DNA
gtgtaggccccgagtgtgct

SEQ ID NO: 13943 - DNA, 20 bp, synthetic construct
  source 1..20: mol_type = other DNA
gctttagaatgggctttgaa

SEQ ID NO: 13944 - DNA, 20 bp, synthetic construct
  source 1..20: mol_type = other DNA
cacttgtgaggaccaagcct

SEQ ID NO: 13945 - DNA, 20 bp, synthetic construct
  source 1..20: mol_type = other DNA
cagcatttcacatctgagct

SEQ ID NO: 13946 - DNA, 20 bp, synthetic construct
  source 1..20: mol_type = other DNA
gagctggctttcctctgccc

SEQ ID NO: 13947 - DNA, 20 bp, synthetic construct
  source 1..20: mol_type = other DNA
acgcttcctgctgccatgcc

SEQ ID NO: 13948 - DNA, 20 bp, synthetic construct
  source 1..20: mol_type = other DNA
cggcccctcaggagcaggtg

SEQ ID NO: 13949 - DNA, 20 bp, synthetic construct
  source 1..20: mol_type = other DNA
tgggatggggctgtcactgg

SEQ ID NO: 13950 - DNA, 20 bp, synthetic construct
  source 1..20: mol_type = other DNA
caggatgggtgtctggggag

SEQ ID NO: 13951 - DNA, 20 bp, synthetic construct
  source 1..20: mol_type = other DNA
cctcgtgccaggccatggag

SEQ ID NO: 13952 - DNA, 20 bp, synthetic construct
  source 1..20: mol_type = other DNA
ccatcccctcgtgccaggcc

SEQ ID NO: 13953 - DNA, 20 bp, synthetic construct
  source 1..20: mol_type = other DNA
tcaggtctccaccaaggagg

SEQ ID NO: 13954 - DNA, 20 bp, synthetic construct
  source 1..20: mol_type = other DNA
tttgggtctgtcctctctgt

SEQ ID NO: 13955 - DNA, 20 bp, synthetic construct
  source 1..20: mol_type = other DNA
aatacttggcttactcaact

SEQ ID NO: 13956 - DNA, 20 bp, synthetic construct
  source 1..20: mol_type = other DNA
aggtgctggagtccaaagtt

SEQ ID NO: 13957 - DNA, 20 bp, synthetic construct
  source 1..20: mol_type = other DNA
gctgtgcatctgcaagggag

SEQ ID NO: 13958 - DNA, 20 bp, synthetic construct
  source 1..20: mol_type = other DNA
gcaagggaggatcataaatt

SEQ ID NO: 13959 - DNA, 20 bp, synthetic construct
  source 1..20: mol_type = other DNA
acagcccttccagaaagagc

SEQ ID NO: 13960 - DNA, 20 bp, synthetic construct
  source 1..20: mol_type = other DNA
gaggccaggagctctctttc

SEQ ID NO: 13961 - DNA, 20 bp, synthetic construct
  source 1..20: mol_type = other DNA
tcctgcctggtacacaatag

SEQ ID NO: 13962 - DNA, 20 bp, synthetic construct
  source 1..20: mol_type = other DNA
agtaaacacctattgtgtac

SEQ ID NO: 13963 - DNA, 20 bp, synthetic construct
  source 1..20: mol_type = other DNA
cacgcagggtgagaggcggg

SEQ ID NO: 13964 - DNA, 20 bp, synthetic construct
  source 1..20: mol_type = other DNA
taactgggctggaaggcagg

SEQ ID NO: 13965 - DNA, 20 bp, synthetic construct
  source 1..20: mol_type = other DNA
gacgctgtttggggagggcg

SEQ ID NO: 13966 - DNA, 20 bp, synthetic construct
  source 1..20: mol_type = other DNA
gattaaacattaacggaacc

SEQ ID NO: 13967 - DNA, 20 bp, synthetic construct
  source 1..20: mol_type = other DNA
gacgatcctatctgattaaa

SEQ ID NO: 13968 - DNA, 20 bp, synthetic construct
  source 1..20: mol_type = other DNA
tggcagtgctctgctcgccc

SEQ ID NO: 13969 - DNA, 20 bp, synthetic construct
  source 1..20: mol_type = other DNA
gggcaggatatcctggcagt

SEQ ID NO: 13970 - DNA, 20 bp, synthetic construct
  source 1..20: mol_type = other DNA
gaacccactataatggcaag

SEQ ID NO: 13971 - DNA, 20 bp, synthetic construct
  source 1..20: mol_type = other DNA
gccgtccttcccaccccgcc

SEQ ID NO: 13972 - DNA, 20 bp, synthetic construct
  source 1..20: mol_type = other DNA
gactccaagctgggggacac

SEQ ID NO: 13973 - DNA, 20 bp, synthetic construct
  source 1..20: mol_type = other DNA
tggcttcctctcactagctg

SEQ ID NO: 13974 - DNA, 23 bp, synthetic construct
  source 1..23: mol_type = other DNA
gcggcctctagactcgaggcgtt

SEQ ID NO: 13975 - DNA, 400 bp, synthetic construct
  source 1..400: mol_type = other DNA
ggcctccgcgccgggttttggcgcctcccgcgggcgcccccctcctcacggcgagcgctgccacgtcagacgaagggcgcagcgagcgtcctgatccttccgcccggacgctcaggacagcggcccgctgctcataagactcggccttagaaccccagtatcagcagaaggacattttaggacgggacttgggtgactctagggcactggttttctttccagagagcggaacaggcgaggaaaagtagtcccttctcggcgattctgcggagggatctccgtggggcggtgaacgccgatgattatataaggacgcgccgggtgtggcacagctagttccgtcgcagccgggatttgggtcgcggttcttgtttgtggatcgctgtgatcgtcacttggt

SEQ ID NO: 13976 - DNA, 18 bp, synthetic construct
  source 1..18: mol_type = other DNA
ctctggctaactaccggt

SEQ ID NO: 13977-13978 - skipped (2 entries)

SEQ ID NO: 13979 - DNA, 27 bp, synthetic construct
  source 1..27: mol_type = other DNA
ccagcggccaaacgggtgaagctggac

SEQ ID NO: 13980 - skipped

SEQ ID NO: 13981 - DNA, 2931 bp, synthetic construct
  source 1..2931: mol_type = other DNA
caagagatcaagagaatcaacaagatcagaaggagactggtcaaggacagcaacacaaagaaggccggcaagacaggccccatgaaaaccctgctcgtcagagtgatgacccctgacctgagagagcggctggaaaacctgagaaagaagcccgagaacatccctcagcctatcagcaacaccagcagggccaacctgaacaagctgctgaccgactacaccgagatgaagaaagccatcctgcacgtgtactgggaagagttccagaaagaccccgtgggcctgatgagcagagttgctcagcctgccagcaagaagatcgaccagaacaagctgaagcccgagatggacgagaagggcaatctgaccacagccggctttgcctgctctcagtgtggccagcctctgttcgtgtacaagctggaacaggtgtccgagaaaggcaaggcctacaccaactacttcggcagatgtaacgtggccgagcacgagaagctgattctgctggcccagctgaaacctgagaaggactctgatgaggccgtgacctacagcctgggcaagtttggacagagagccctggacttctacagcatccacgtgaccaaagaaagcacacaccccgtgaagcccctggctcagatcgccggcaatagatacgcctctggacctgtgggcaaagccctgtccgatgcctgcatgggaacaatcgccagcttcctgagcaagtaccaggacatcatcatcgagcaccagaaggtggtcaagggcaaccagaagagactggaaagcctgagggagctggccggcaaagagaacctggaataccccagcgtgaccctgcctcctcagcctcacacaaaagaaggcgtggacgcctacaacgaagtgatcgccagagtgagaatgtgggtcaacctgaacctgtggcagaagctgaaactgtccagggacgacgccaagcctctgctgagactgaagggcttccctagcttccctctggtggaaagacaggccaatgaagtggattggtgggacatggtctgcaacgtgaagaagctgatcaacgagaagaaagaggatggcaaggttttctggcagaacctggccggctacaagagacaagaagccctgaggccttacctgagcagcgaagaggaccggaagaagggcaagaagttcgccagataccagctgggcgacctgctgctgcacctggaaaagaagcacggcgaggactggggcaaagtgtacgatgaggcctgggagagaatcgacaagaaggtggaaggcctgagcaagcacattaagctggaagaggaaagaaggagcgaggacgcccaatctaaagccgctctgaccgattggctgagagccaaggccagctttgtgatcgagggcctgaaagaggccgacaaggacgagttctgcagatgcgagctgaagctgcagaagtggtacggcgatctgagaggcaagcccttcgccattgaggccgagaacagcatcctggacatcagcggcttcagcaagcagtacaactgcgccttcatttggcagaaagacggcgtcaagaaactgaacctgtacctgatcatcaattacttcaaaggcggcaagctgcggttcaagaagatcaaacccgaggccttcgaggctaacagattctacaccgtgatcaacaaaaagtccggcgagatcgtgcccatggaagtgaacttcaacttcgacgaccccaacctgattatcctgcctctggccttcggcaagagacagggcagagagttcatctggaacgatctgctgagcctggaaaccggctctctgaagctggccaatggcagagtgatcgagaaaaccctgtacaacaggagaaccagacaggacgagcctgctctgtttgtggccctgaccttcgagagaagagaggtgctggacagcagcaacatcaagcccatgaacctgatcggcgtggaccggggcgagaatatccctgctgtgatcgccctgacagaccctgaaggatgcccactgagcagattcaaggactccctgggcaaccctacacacatcctgagaatcggcgagagctacaaagagaagcagaggacaatccaggccaagaaagaggtggaacagcgcagagccggcggatactctaggaagtacgccagcaaggccaagaatctggccgacgacatggtccgaaacaccgccagagatctgctgtactacgccgtgacacaggacgccatgctgatcttcgagaatctgagcagaggcttcggccggcagggcaagagaacctttatggccgagaggcagtacaccagaatggaagattggctcacagctaaactggcctacgagggactgagcaagacctacctgtccaaaacactggcccagtatacctccaagacctgcagcaattgcggcttcaccatcaccagcgccgactacgacagagtgctggaaaagctcaagaaaaccgccaccggctggatgaccaccatcaacggcaaagagctgaaggttgagggccagatcacctactacaacaggtacaagaggcagaacgtcgtgaaggatctgagcgtggaactggacagactgagcgaagagagcgtgaacaacgacatcagcagctggacaaagggcagatcaggcgaggctctgagcctgctgaagaagaggtttagccacagacctgtgcaagagaagttcgtgtgcctgaactgcggcttcgagacacacgccgatgaacaggctgccctgaacattgccagaagctggctgttcctgagaagccaagagtacaagaagtaccagaccaacaagaccaccggcaacaccgacaagagggcctttgtggaaacctggcagagcttctacagaaaaaagctgaaagaagtctggaagcccgccgtg

SEQ ID NO: 13982 - DNA, 2937 bp, synthetic construct
  source 1..2937: mol_type = other DNA
caagagatcaagagaatcaacaagatcagaaggagactggtcaaggacagcaacacaaagaaggccggcaagacacggggccccatgaaaaccctgctcgtcagagtgatgacccctgacctgagagagcggctggaaaacctgagaaagaagcccgagaacatccctcagcctatcagcaacaccagcagggccaacctgaacaagctgctgaccgactacaccgagatgaagaaagccatcctgcacgtgtactgggaagagttccagaaagaccccgtgggcctgatgagcagagttgctcagcctgccagcaagaagatcgaccagaacaagctgaagcccgagatggacgagaagggcaatctgaccacagccggctttgcctgctctcagtgtggccagcctctgttcgtgtacaagctggaacaggtgtccgagaaaggcaaggcctacaccaactacttcggcagatgtaacgtggccgagcacgagaagctgattctgctggcccagctgaaacctgagaaggactctgatgaggccgtgacctacagcctgggcaagtttggacagagagccctggacttctacagcatccacgtgaccaaagaaagcacacaccccgtgaagcccctggctcagatcgccggcaatagatacgcctcttcccctgtgggcaaagccctgtccgatgcctgcatgggaacaatcgccagcttcctgagcaagtaccaggacatcatcatcgagcaccagaaggtggtcaagggcaaccagaagagactggaaagcctgagggagctggccggcaaagagaacctggaataccccagcgtgaccctgcctcctcagcctcacacaaaagaaggcgtggacgcctacaacgaagtgatcgccagagtgagaatgtgggtcaacctgaacctgtggcagaagctgaaactgtccagggacgacgccaagcctctgctgagactgaagggcttccctagcttccctctggtggaaagacaggccaatgaagtggattggtgggacatggtctgcaacgtgaagaagctgatcaacgagaagaaagaggatggcaaggttttctggcagaacctggccggctacaagagacaagaagccctgaggccttacctgagcagcgaagaggaccggaagaagggcaagaagttcgccagataccagctgggcgacctgctgctgcacctggaaaagaagcacggcgaggactggggcaaagtgtacgatgaggcctgggagagaatcgacaagaaggtggaaggcctgagcaagcacattaagctggaagaggaaagaaggagcgaggacgcccaatctaaagccgctctgaccgattggctgagagccaaggccagctttgtgatcgagggcctgaaagaggccgacaaggacgagttctgcagatgcgagctgaagctgcagaagtggtacggcgatctgagaggcaagcccttcgccattgaggccgagaacagcatcctggacatcagcggcttcagcaagcagtacaactgcgccttcatttggcagaaagacggcgtcaagaaactgaacctgtacctgatcatcaattacttcaaaggcggcaagctgcggttcaagaagatcaaacccgaggccttcgaggctaacagattctacaccgtgatcaacaaaaagtccggcgagatcgtgcccatggaagtgaacttcaacttcgacgaccccaacctgattatcctgcctctggccttcggcaagagacagggcagagagttcatctggaacgatctgctgagcctggaaaccggctctctgaagctggccaatggcagagtgatcgagaaaaccctgtacaacaggagaaccagacaggacgagcctgctctgtttgtggccctgaccttcgagagaagagaggtgctggacagcagcaacatcaagcccatgaacctgatcggcgtggaccggggcgagaatatccctgctgtgatcgccctgacagaccctgaaggatgcccactgagcagattcaaggactccctgggcaaccctacacacatcctgagaatcggcgagagctacaaagagaagcagaggacaatccaggccaagaaagaggtggaacagagaagagccggcggatactctaggaagtacgccagcaaggccaagaatctggccgacgacatggtccgaaacaccgccagagatctgctgtactacgccgtgacacaggacgccatgctgatcttcgagaatctgagcagaggcttcggccggcagggcaagagaacctttatggccgagaggcagtacaccagaatggaagattggctcacagctaaactggcctacgagggactgcccagcaagacctacctgtccaaaacactggcccagtatacctccaagacctgcagcaattgcggcttcaccatcaccagcgccgactacgacagagtgctggaaaagctcaagaaaaccgccaccggctggatgaccaccatcaacggcaaagagctgaaggttgagggccagatcacctactacaacaggtacaagaggcagaacgtcgtgaaggatctgagcgtggaactggacagactgagcgaagagagcgtgaacaacgacatcagcagctggacaaagggcagatcaggcgaggctctgagcctgctgaagaagaggtttagccacagacctgtgcaagagaagttcgtgtgcctgaactgcggcttcgagacacacgccgatgaacaggctgccctgaacattgccagaagctggctgttcctgagaagccaagagtacaagaagtaccagaccaacaagaccaccggcaacaccgacaagagggcctttgtggaaacctggcagagcttctacagaaaaaagctgaaagaagtctggaagcccgccgtg

SEQ ID NO: 13983 - DNA, 2934 bp, synthetic construct
  source 1..2934: mol_type = other DNA
caagagatcaagagaatcaacaagatcagaaggagactggtcaaggacagcaacacaaagaaggccggcaagacaggccccatgaaaaccctgctcgtcagagtgatgacccctgacctgagagagcggctggaaaacctgagaaagaagcccgagaacatccctcagcctatcagcaacaccagcagggccaacctgaacaagctgctgaccgactacaccgagatgaagaaagccatcctgcacgtgtactgggaagagttccagaaagaccccgtgggcctgatgagcagagttgctcagcctgccagcaagaagatcgaccagaacaagctgaagcccgagatggacgagaagggcaatctgaccacagccggctttgcctgctctcagtgtggccagcctctgttcgtgtacaagctggaacaggtgtccgagaaaggcaaggcctacaccaactacttcggcagatgtaacgtggccgagcacgagaagctgattaagctggcccagctgaaacctgagaaggactctgatgaggccgtgacctacagcctgggcaagtttggacagagagccctggacttctacagcatccacgtgaccaaagaaagcacacaccccgtgaagcccctggctcagatcgccggcaatagatacgcctcttcccctgtgggcaaagccctgtccgatgcctgcatgggaacaatcgccagcttcctgagcaagtaccaggacatcatcatcgagcaccagaaggtggtcaagggcaaccagaagagactggaaagcctgagggagctggccggcaaagagaacctggaataccccagcgtgaccctgcctcctcagcctcacacaaaagaaggcgtggacgcctacaacgaagtgatcgccagagtgagaatgtgggtcaacctgaacctgtggcagaagctgaaactgtccagggacgacgccaagcctctgctgagactgaagggcttccctagcttccctctggtggaaagacaggccaatgaagtggattggtgggacatggtctgcaacgtgaagaagctgatcaacgagaagaaagaggatggcaaggttttctggcagaacctggccggctacaagagacaagaagccctgaggccttacctgagcagcgaagaggaccggaagaagggcaagaagttcgccagataccagctgggcgacctgctgctgcacctggaaaagaagcacggcgaggactggggcaaagtgtacgatgaggcctgggagagaatcgacaagaaggtggaaggcctgagcaagcacattaagctggaagaggaaagaaggagcgaggacgcccaatctaaagccgctctgaccgattggctgagagccaaggccagctttgtgatcgagggcctgaaagaggccgacaaggacgagttctgcagatgcgagctgaagctgcagaagtggtacggcgatctgagaggcaagcccttcgccattgaggccgagaacagcatcctggacatcagcggcttcagcaagcagtacaactgcgccttcatttggcagaaagacggcgtcaagaaactgaacctgtacctgatcatcaattacttcaaaggcggcaagctgcggttcaagaagatcaaacccgaggccttcgaggctaacagattctacaccgtgatcaacaaaaagtccggcgagatcgtgcccatggaagtgaacttcaacttcgacgaccccaacctgattatcctgcctctggccttcggcaagagacagggcagagagttcatctggaacgatctgctgagcctggaaaccggctctctgaagctggccaatggcagagtgatcgagaaaaccctgtacaacaggagaaccagacaggacgagcctgctctgtttgtggccctgaccttcgagagaagagaggtgctggacagcagcaacatcaagcccatgaacctgatcggcgtggaccggggcgagaatatccctgctgtgatcgccctgacagaccctgaaggatgcccactgagcagattcaaggactccctgggcaaccctacacacatcctgagaatcggcgagagctacaaagagaagcagaggacaatccaggccaagaaagaggtggaacagagaagagccggcggatactctaggaagtacgccagcaaggccaagaatctggccgacgacatggtccgaaacaccgccagagatctgctgtactacgccgtgacacaggacgccatgctgatcttcgagaatctgagcagaggcttcggccggcagggcaagagaacctttatggccgagaggcagtacaccagaatggaagattggctcacagctaaactggcctacgagggactgcccagcaagacctacctgtccaaaacactggcccagtatacctccaagacctgcagcaattgcggcttcaccatcaccagcgccgactacgacagagtgctggaaaagctcaagaaaaccgccaccggctggatgaccaccatcaacggcaaagagctgaaggttgagggccagatcacctactacaacaggtacaagaggcagaacgtcgtgaaggatctgagcgtggaactggacagactgagcgaagagagcgtgaacaacgacatcagcagctggacaaagggcagatcaggcgaggctctgagcctgctgaagaagaggtttagccacagacctgtgcaagagaagttcgtgtgcctgaactgcggcttcgagacacacgccgatgaacaggctgccctgaacattgccagaagctggctgttcctgagaagccaagagtacaagaagtaccagaccaacaagaccaccggcaacaccgacaagagggcctttgtggaaacctggcagagcttctacagaaaaaagctgaaagaagtctggaagcccgccgtg

SEQ ID NO: 13984 - DNA, 2937 bp, synthetic construct
  source 1..2937: mol_type = other DNA
caagagatcaagagaatcaacaagatcagaaggagactggtcaaggacagcaacacaaagaaggccggcaagacacggggccccatgaaaaccctgctcgtcagagtgatgacccctgacctgagagagcggctggaaaacctgagaaagaagcccgagaacatccctcagcctatcagcaacaccagcagggccaacctgaacaagctgctgaccgactacaccgagatgaagaaagccatcctgcacgtgtactgggaagagttccagaaagaccccgtgggcctgatgagcagagttgctcagcctgccagcaagaagatcgaccagaacaagctgaagcccgagatggacgagaagggcaatctgaccacagccggctttgcctgctctcagtgtggccagcctctgttcgtgtacaagctggaacaggtgtccgagaaaggcaaggcctacaccaactacttcggcagatgtaacgtggccgagcacgagaagctgattaagctggcccagctgaaacctgagaaggactctgatgaggccgtgacctacagcctgggcaagtttggacagagagccctggacttctacagcatccacgtgaccaaagaaagcacacaccccgtgaagcccctggctcagatcgccggcaatagatacgcctcttcccctgtgggcaaagccctgtccgatgcctgcatgggaacaatcgccagcttcctgagcaagtaccaggacatcatcatcgagcaccagaaggtggtcaagggcaaccagaagagactggaaagcctgagggagctggccggcaaagagaacctggaataccccagcgtgaccctgcctcctcagcctcacacaaaagaaggcgtggacgcctacaacgaagtgatcgccagagtgagaatgtgggtcaacctgaacctgtggcagaagctgaaactgtccagggacgacgccaagcctctgctgagactgaagggcttccctagcttccctctggtggaaagacaggccaatgaagtggattggtgggacatggtctgcaacgtgaagaagctgatcaacgagaagaaagaggatggcaaggttttctggcagaacctggccggctacaagagacaagaagccctgaggccttacctgagcagcgaagaggaccggaagaagggcaagaagttcgccagataccagctgggcgacctgctgctgcacctggaaaagaagcacggcgaggactggggcaaagtgtacgatgaggcctgggagagaatcgacaagaaggtggaaggcctgagcaagcacattaagctggaagaggaaagaaggagcgaggacgcccaatctaaagccgctctgaccgattggctgagagccaaggccagctttgtgatcgagggcctgaaagaggccgacaaggacgagttctgcagatgcgagctgaagctgcagaagtggtacggcgatctgagaggcaagcccttcgccattgaggccgagaacagcatcctggacatcagcggcttcagcaagcagtacaactgcgccttcatttggcagaaagacggcgtcaagaaactgaacctgtacctgatcatcaattacttcaaaggcggcaagctgcggttcaagaagatcaaacccgaggccttcgaggctaacagattctacaccgtgatcaacaaaaagtccggcgagatcgtgcccatggaagtgaacttcaacttcgacgaccccaacctgattatcctgcctctggccttcggcaagagacagggcagagagttcatctggaacgatctgctgagcctggaaaccggctctctgaagctggccaatggcagagtgatcgagaaaaccctgtacaacaggagaaccagacaggacgagcctgctctgtttgtggccctgaccttcgagagaagagaggtgctggacagcagcaacatcaagcccatgaacctgatcggcgtggaccggggcgagaatatccctgctgtgatcgccctgacagaccctgaaggatgcccactgagcagattcaaggactccctgggcaaccctacacacatcctgagaatcggcgagagctacaaagagaagcagaggacaatccaggccaagaaagaggtggaacagagaagagccggcggatactctaggaagtacgccagcaaggccaagaatctggccgacgacatggtccgaaacaccgccagagatctgctgtactacgccgtgacacaggacgccatgctgatcttcgagaatctgagcagaggcttcggccggcagggcaagagaacctttatggccgagaggcagtacaccagaatggaagattggctcacagctaaactggcctacgagggactgcccagcaagacctacctgtccaaaacactggcccagtatacctccaagacctgcagcaattgcggcttcaccatcaccagcgccgactacgacagagtgctggaaaagctcaagaaaaccgccaccggctggatgaccaccatcaacggcaaagagctgaaggttgagggccagatcacctactacaacaggtacaagaggcagaacgtcgtgaaggatctgagcgtggaactggacagactgagcgaagagagcgtgaacaacgacatcagcagctggacaaagggcagatcaggcgaggctctgagcctgctgaagaagaggtttagccacagacctgtgcaagagaagttcgtgtgcctgaactgcggcttcgagacacacgccgatgaacaggctgccctgaacattgccagaagctggctgttcctgagaagccaagagtacaagaagtaccagaccaacaagaccaccggcaacaccgacaagagggcctttgtggaaacctggcagagcttctacagaaaaaagctgaaagaagtctggaagcccgccgtg

SEQ ID NO: 13985 - skipped

SEQ ID NO: 13986 - DNA, 27 bp, synthetic construct
  source 1..27: mol_type = other DNA
ccagccgcgaagcgagtgaaactggac

SEQ ID NO: 13987 - DNA, 33 bp, synthetic construct
  source 1..33: mol_type = other DNA
taagaattcctagagctcgctgatcagcctcga

SEQ ID NO: 13988 - DNA, 208 bp, synthetic construct
  source 1..208: mol_type = other DNA
ctgtgccttctagttgccagccatctgttgtttgcccctcccccgtgccttccttgaccctggaaggtgccactcccactgtcctttcctaataaaatgaggaaattgcatcgcattgtctgagtaggtgtcattctattctggggggtggggtggggcaggacagcaagggggaggattgggaagagaatagcaggcatgctgggga

SEQ ID NO: 13989 - skipped

SEQ ID NO: 13990 - DNA, 241 bp, synthetic construct
  source 1..241: mol_type = other DNA
gagggcctatttcccatgattccttcatatttgcatatacgatacaaggctgttagagagataattggaattaatttgactgtaaacacaaagatattagtacaaaatacgtgacgtagaaagtaataatttcttgggtagtttgcagttttaaaattatgttttaaaatggactatcatatgcttaccgtaacttgaaagtatttcgatttcttggctttatatatcttgtggaaaggac

SEQ ID NO: 13991 - skipped

SEQ ID NO: 13992 - DNA, 99 bp, synthetic construct
  source 1..99: mol_type = other DNA
actggcgcttctatctgattactctgagcgccatcaccagcgactatgtcgtagtgggtaaagccgcttacggacttcggtccgtaagaggcatcagag

SEQ ID NO: 13993 - DNA, 17 bp, synthetic construct
  source 1..17: mol_type = other DNA
ttttttttggcggccgc

SEQ ID NO: 13994 - RNA, 109 nt, synthetic construct
  source 1..109: mol_type = other RNA
actggcgcttttatctgattactttgagagccatcaccagcgactatgtcgtagtgggtaaagctccctcttcggagggagcatcaaagtcctggcttcctggtgaaga

SEQ ID NO: 13995 - RNA, 109 nt, synthetic construct; identical to SEQ ID NO: 13994
  modified_base 1..4: mod_base = OTHER; note = nucleotides linked via phosphorothioate
  modified_base 1: mod_base = OTHER; note = 2'-O-methyl-adenosine
  modified_base 2: mod_base = cm
  modified_base 3: mod_base = um
  modified_base 107: mod_base = OTHER; note = 2'-O-methyl-adenosine
  modified_base 107..109: mod_base = OTHER; note = nucleotides linked via phosphorothioate
  modified_base 108: mod_base = gm
  modified_base 109: mod_base = OTHER; note = 2'-O-methyl-adenosine
  source 1..109: mol_type = other RNA

SEQ ID NO: 13996 - RNA, 109 nt, synthetic construct
  source 1..109: mol_type = other RNA
actggcgcttttatctgattactttgagagccatcaccagcgactatgtcgtagtgggtaaagctccctcttcggagggagcatcaaagtggcttcctggtgaagatga

SEQ ID NO: 13997 - RNA, 109 nt, synthetic construct; identical to SEQ ID NO: 13996
  modified_base 1..4: mod_base = OTHER; note = nucleotides linked via phosphorothioate
  modified_base 1: mod_base = OTHER; note = 2'-O-methyl-adenosine
  modified_base 2: mod_base = cm
  modified_base 3: mod_base = um
  modified_base 107: mod_base = um
  modified_base 107..109: mod_base = OTHER; note = nucleotides linked via phosphorothioate
  modified_base 108: mod_base = gm
  modified_base 109: mod_base = OTHER; note = 2'-O-methyl-adenosine
  source 1..109: mol_type = other RNA

SEQ ID NO: 13998 - RNA, 109 nt, synthetic construct
  source 1..109: mol_type = other RNA
actggcgcttttatctgattactttgagagccatcaccagcgactatgtcgtagtgggtaaagctccctcttcggagggagcatcaaaggtgtagtacaagagatagaa

SEQ ID NO: 13999 - RNA, 109 nt, synthetic construct; identical to SEQ ID NO: 13998
  modified_base 1..4: mod_base = OTHER; note = nucleotides linked via phosphorothioate
  modified_base 1: mod_base = OTHER; note = 2'-O-methyl-adenosine
  modified_base 2: mod_base = cm
  modified_base 3: mod_base = um
  modified_base 107: mod_base = gm
  modified_base 107..109: mod_base = OTHER; note = nucleotides linked via phosphorothioate
  modified_base 108: mod_base = OTHER; note = 2'-O-methyl-adenosine
  modified_base 109: mod_base = OTHER; note = 2'-O-methyl-adenosine
  source 1..109: mol_type = other RNA

SEQ ID NO: 14000 - RNA, 109 nt, synthetic construct
  source 1..109: mol_type = other RNA
actggcgcttctatctgattactctgagcgccatcaccagcgactatgtcgtagtgggtaaagctccctcttcggagggagcatcagagtcctggcttcctggtgaaga

SEQ ID NO: 14001 - RNA, 109 nt, synthetic construct; identical to SEQ ID NO: 14000
  modified_base 1..4: mod_base = OTHER; note = nucleotides linked via phosphorothioate
  modified_base 1: mod_base = OTHER; note = 2'-O-methyl-adenosine
  modified_base 2: mod_base = cm
  modified_base 3: mod_base = um
  modified_base 107: mod_base = OTHER; note = 2'-O-methyl-adenosine
  modified_base 107..109: mod_base = OTHER; note = nucleotides linked via phosphorothioate
  modified_base 108: mod_base = gm
  modified_base 109: mod_base = OTHER; note = 2'-O-methyl-adenosine
  source 1..109: mol_type = other RNA

SEQ ID NO: 14002 - RNA, 109 nt, synthetic construct
  source 1..109: mol_type = other RNA
actggcgcttctatctgattactctgagcgccatcaccagcgactatgtcgtagtgggtaaagctccctcttcggagggagcatcagagtggcttcctggtgaagatga

SEQ ID NO: 14003 - RNA, 109 nt, synthetic construct; identical to SEQ ID NO: 14002
  modified_base 1..4: mod_base = OTHER; note = nucleotides linked via phosphorothioate
  modified_base 1: mod_base = OTHER; note = 2'-O-methyl-adenosine
  modified_base 2: mod_base = cm
  modified_base 3: mod_base = um
  modified_base 107: mod_base = um
  modified_base 107..109: mod_base = OTHER; note = nucleotides linked via phosphorothioate
  modified_base 108: mod_base = gm
  modified_base 109: mod_base = OTHER; note = 2'-O-methyl-adenosine
  source 1..109: mol_type = other RNA

SEQ ID NO: 14004 - RNA, 109 nt, synthetic construct
  source 1..109: mol_type = other RNA
actggcgcttctatctgattactctgagcgccatcaccagcgactatgtcgtagtgggtaaagctccctcttcggagggagcatcagaggtgtagtacaagagatagaa

SEQ ID NO: 14005 - RNA, 109 nt, synthetic construct; identical to SEQ ID NO: 14004
  modified_base 1..4: mod_base = OTHER; note = nucleotides linked via phosphorothioate
  modified_base 1: mod_base = OTHER; note = 2'-O-methyl-adenosine
  modified_base 2: mod_base = cm
  modified_base 3: mod_base = um
  modified_base 107: mod_base = gm
  modified_base 107..109: mod_base = OTHER; note = nucleotides linked via phosphorothioate
  modified_base 108: mod_base = OTHER; note = 2'-O-methyl-adenosine
  modified_base 109: mod_base = OTHER; note = 2'-O-methyl-adenosine
  source 1..109: mol_type = other RNA

SEQ ID NO: 14006 - RNA, 107 nt, synthetic construct
  source 1..107: mol_type = other RNA
actggcgcttttatctgattactttgagagccatcaccagcgactatgtcgtagtgggtaaagctccctcttcggagggagcatcaaagggccgagatgtctcgctc

SEQ ID NO: 14007 - RNA, 107 nt, synthetic construct; identical to SEQ ID NO: 14006
  modified_base 1..4: mod_base = OTHER; note = nucleotides linked via phosphorothioate
  modified_base 1: mod_base = OTHER; note = 2'-O-methyl-adenosine
  modified_base 2: mod_base = cm
  modified_base 3: mod_base = um
  modified_base 105: mod_base = cm
  modified_base 105..107: mod_base = OTHER; note = nucleotides linked via phosphorothioate
  modified_base 106: mod_base = um
  modified_base 107: mod_base = cm
  source 1..107: mol_type = other RNA

SEQ ID NO: 14008 - RNA, 119 nt, synthetic construct
  source 1..119: mol_type = other RNA
actggcgcttctatctgattactctgagcgccatcaccagcgactatgtcgtagtgggtaaagccgcttacggacttcggtccgtaagaggcatcagagtcctggcttcctggtgaaga

SEQ ID NO: 14009 - RNA, 119 nt, synthetic construct; identical to SEQ ID NO: 14008
  modified_base 1..4: mod_base = OTHER; note = nucleotides linked via phosphorothioate
  modified_base 1: mod_base = OTHER; note = 2'-O-methyl-adenosine
  modified_base 2: mod_base = cm
  modified_base 3: mod_base = um
  modified_base 117: mod_base = OTHER; note = 2'-O-methyl-adenosine
  modified_base 117..119: mod_base = OTHER; note = nucleotides linked via phosphorothioate
  modified_base 118: mod_base = gm
  modified_base 119: mod_base = OTHER; note = 2'-O-methyl-adenosine
  source 1..119: mol_type = other RNA

SEQ ID NO: 14010 - RNA, 123 nt, synthetic construct
  modified_base 1..4: mod_base = OTHER; note = nucleotides linked via phosphorothioate
  modified_base 1: mod_base = OTHER; note = 2'-O-methyl-adenosine
  modified_base 2: mod_base = cm
  modified_base 3: mod_base = um
  modified_base 120..123: mod_base = OTHER; note = nucleotides linked via phosphorothioate
  modified_base 121: mod_base = um
  modified_base 122: mod_base = um
  modified_base 123: mod_base = um
  source 1..123: mol_type = other RNA
actggcgcttctatctgattactctgagcgccatcaccagcgactatgtcgtagtgggtaaagccgcttacggacttcggtccgtaagaggcatcagagtcctggcttcctggtgaagatttt

SEQ ID NO: 14011 - RNA, 119 nt, synthetic construct; identical to SEQ ID NO: 14008
  modified_base 1..4: mod_base = OTHER; note = nucleotides linked via phosphorothioate
  modified_base 1: mod_base = OTHER; note = 2'-O-methyl-adenosine
  modified_base 2: mod_base = cm
  modified_base 3: mod_base = um
  modified_base 4: mod_base = gm
  modified_base 5: mod_base = gm
  modified_base 6: mod_base = cm
  modified_base 7: mod_base = gm
  modified_base 8: mod_base = cm
  modified_base 9: mod_base = um
  modified_base 10: mod_base = um
  modified_base 11: mod_base = cm
  modified_base 12: mod_base = um
  modified_base 13: mod_base = OTHER; note = 2'-O-methyl-adenosine
  modified_base 14: mod_base = um
  modified_base 15: mod_base = cm
  modified_base 16: mod_base = um
  modified_base 17: mod_base = gm
  modified_base 18: mod_base = OTHER; note = 2'-O-methyl-adenosine
  modified_base 19: mod_base = um
  modified_base 27: mod_base = OTHER; note = 2'-O-methyl-adenosine
  modified_base 28: mod_base = gm
  modified_base 29: mod_base = cm
  modified_base 30: mod_base = gm
  modified_base 31: mod_base = cm
  modified_base 32: mod_base = cm
  modified_base 33: mod_base = OTHER; note = 2'-O-methyl-adenosine
  modified_base 34: mod_base = um
  modified_base 35: mod_base = cm
  modified_base 36: mod_base = OTHER; note = 2'-O-methyl-adenosine
  modified_base 37: mod_base = cm
  modified_base 38: mod_base = cm
  modified_base 44: mod_base = cm
  modified_base 45: mod_base = um
  modified_base 48: mod_base = gm
  modified_base 49: mod_base = um
  modified_base 50: mod_base = cm
  modified_base 51: mod_base = gm
  modified_base 57: mod_base = gm
  modified_base 58: mod_base = gm
  modified_base 59: mod_base = um
  modified_base 60: mod_base = OTHER; note = 2'-O-methyl-adenosine
  modified_base 61: mod_base = OTHER; note = 2'-O-methyl-adenosine
  modified_base 62: mod_base = OTHER; note = 2'-O-methyl-adenosine
  modified_base 63: mod_base = gm
  modified_base 64: mod_base = cm
  modified_base 65: mod_base = cm
  modified_base 66: mod_base = gm
  modified_base 67: mod_base = cm
  modified_base 68: mod_base = um
  modified_base 69: mod_base = um
  modified_base 70: mod_base = OTHER; note = 2'-O-methyl-adenosine
  modified_base 71: mod_base = cm
  modified_base 72: mod_base = gm
  modified_base 73: mod_base = gm
  modified_base 74: mod_base = OTHER; note = 2'-O-methyl-adenosine
  modified_base 75: mod_base = cm
  modified_base 76: mod_base = um
  modified_base 77: mod_base = um
  modified_base 78: mod_base = cm
  modified_base 79: mod_base = gm
  modified_base 80: mod_base = gm
  modified_base 81: mod_base = um
  modified_base 82: mod_base = cm
  modified_base 83: mod_base = cm
  modified_base 84: mod_base = gm
  modified_base 85: mod_base = um
  modified_base 86: mod_base = OTHER; note = 2'-O-methyl-adenosine
  modified_base 87: mod_base = OTHER; note = 2'-O-methyl-adenosine
  modified_base 88: mod_base = gm
  modified_base 89: mod_base = OTHER; note = 2'-O-methyl-adenosine
  modified_base 90: mod_base = gm
  modified_base 91: mod_base = gm
  modified_base 92: mod_base = cm
  modified_base 93: mod_base = OTHER; note = 2'-O-methyl-adenosine
  modified_base 94: mod_base = um
  modified_base 95: mod_base = cm
  modified_base 96: mod_base = OTHER; note = 2'-O-methyl-adenosine
  modified_base 117: mod_base = OTHER; note = 2'-O-methyl-adenosine
  modified_base 117..119: mod_base = OTHER; note = nucleotides linked via phosphorothioate
  modified_base 118: mod_base = gm
  modified_base 119: mod_base = OTHER; note = 2'-O-methyl-adenosine
  source 1..119: mol_type = other RNA

SEQ ID NO: 14012 - RNA, 119 nt, synthetic construct; identical to SEQ ID NO: 14008
  modified_base 1..4: mod_base = OTHER; note = nucleotides linked via phosphorothioate
  modified_base 1: mod_base = OTHER; note = 2'-O-methyl-adenosine
  modified_base 2: mod_base = cm
  modified_base 3: mod_base = um
  modified_base 4: mod_base = gm
  modified_base 5: mod_base = gm
  modified_base 6: mod_base = cm
  modified_base 7: mod_base = gm
  modified_base 8: mod_base = cm
  modified_base 13: mod_base = OTHER; note = 2'-O-methyl-adenosine
  modified_base 14: mod_base = um
  modified_base 15: mod_base = cm
  modified_base 16: mod_base = um
  modified_base 17: mod_base = gm
  modified_base 18: mod_base = OTHER; note = 2'-O-methyl-adenosine
  modified_base 19: mod_base = um
  modified_base 27: mod_base = OTHER; note = 2'-O-methyl-adenosine
  modified_base 28: mod_base = gm
  modified_base 29: mod_base = cm
  modified_base 30: mod_base = gm
  modified_base 31: mod_base = cm
  modified_base 32: mod_base = cm
  modified_base 33: mod_base = OTHER; note = 2'-O-methyl-adenosine
  modified_base 34: mod_base = um
  modified_base 35: mod_base = cm
  modified_base 36: mod_base = OTHER; note = 2'-O-methyl-adenosine
  modified_base 37: mod_base = cm
  modified_base 38: mod_base = cm
  modified_base 44: mod_base = cm
  modified_base 45: mod_base = um
  modified_base 48: mod_base = gm
  modified_base 49: mod_base = um
  modified_base 50: mod_base = cm
  modified_base 51: mod_base = gm
  modified_base 57: mod_base = gm
  modified_base 58: mod_base = gm
  modified_base 59: mod_base = um
  modified_base 60: mod_base = OTHER; note = 2'-O-methyl-adenosine
  modified_base 61: mod_base = OTHER; note = 2'-O-methyl-adenosine
  modified_base 62: mod_base = OTHER; note = 2'-O-methyl-adenosine
  modified_base 63: mod_base = gm
  modified_base 64: mod_base = cm
  modified_base 65: mod_base = cm
  modified_base 66: mod_base = gm
  modified_base 67: mod_base = cm
  modified_base 68: mod_base = um
  modified_base 69: mod_base = um
  modified_base 70: mod_base = OTHER; note = 2'-O-methyl-adenosine
  modified_base 71: mod_base = cm
  modified_base 72: mod_base = gm
  modified_base 73: mod_base = gm
  modified_base 74: mod_base = OTHER; note = 2'-O-methyl-adenosine
  modified_base 75: mod_base = cm
  modified_base 76: mod_base = um
  modified_base 77: mod_base = um
  modified_base 78: mod_base = cm
  modified_base 79: mod_base = gm
  modified_base 80: mod_base = gm
  modified_base 81: mod_base = um
  modified_base 82: mod_base = cm
  modified_base 83: mod_base = cm
  modified_base 84: mod_base = gm
  modified_base 85: mod_base = um
  modified_base 86: mod_base = OTHER; note = 2'-O-methyl-adenosine
  modified_base 87: mod_base = OTHER; note = 2'-O-methyl-adenosine
  modified_base 88: mod_base = gm
  modified_base 89: mod_base = OTHER; note = 2'-O-methyl-adenosine
  modified_base 90: mod_base = gm
  modified_base 91: mod_base = gm
  modified_base 92: mod_base = cm
  modified_base 93: mod_base = OTHER; note = 2'-O-methyl-adenosine
  modified_base 94: mod_base = um
  modified_base 117: mod_base = OTHER; note = 2'-O-methyl-adenosine
  modified_base 117..119: mod_base = OTHER; note = nucleotides linked via phosphorothioate
  modified_base 118: mod_base = gm
  modified_base 119: mod_base = OTHER; note = 2'-O-methyl-adenosine
  source 1..119: mol_type = other RNA

SEQ ID NO: 14013 - RNA, 119 nt, synthetic construct; identical to SEQ ID NO: 14008
  modified_base 1..4: mod_base = OTHER; note = nucleotides linked via phosphorothioate
  modified_base 1: mod_base = OTHER; note = 2'-O-methyl-adenosine
  modified_base 2: mod_base = cm
  modified_base 3: mod_base = um
  modified_base 44: mod_base = cm
  modified_base 45: mod_base = um
  modified_base 48: mod_base = gm
  modified_base 49: mod_base = um
  modified_base 50: mod_base = cm
  modified_base 51: mod_base = gm
  modified_base 60: mod_base = OTHER; note = 2'-O-methyl-adenosine
  modified_base 61: mod_base = OTHER; note = 2'-O-methyl-adenosine
  modified_base 62: mod_base = OTHER; note = 2'-O-methyl-adenosine
  modified_base 63: mod_base = gm
  modified_base 64: mod_base = cm
  modified_base 65: mod_base = cm
  modified_base 66: mod_base = gm
  modified_base 67: mod_base = cm
  modified_base 68: mod_base = um
  modified_base 69: mod_base = um
  modified_base 70: mod_base = OTHER; note = 2'-O-methyl-adenosine
  modified_base 71: mod_base = cm
  modified_base 72: mod_base = gm
  modified_base 73: mod_base = gm
  modified_base 74: mod_base = OTHER; note = 2'-O-methyl-adenosine
  modified_base 75: mod_base = cm
  modified_base 76: mod_base = um
  modified_base 77: mod_base = um
  modified_base 78: mod_base = cm
  modified_base 79: mod_base = gm
  modified_base 80: mod_base = gm
  modified_base 81: mod_base = um
  modified_base 82: mod_base = cm
  modified_base 83: mod_base = cm
  modified_base 84: mod_base = gm
  modified_base 85: mod_base = um
  modified_base 86: mod_base = OTHER; note = 2'-O-methyl-adenosine
  modified_base 87: mod_base = OTHER; note = 2'-O-methyl-adenosine
  modified_base 88: mod_base = gm
  modified_base 89: mod_base = OTHER; note = 2'-O-methyl-adenosine
  modified_base 90: mod_base = gm
  modified_base 91: mod_base = gm
  modified_base 92: mod_base = cm
  modified_base 117: mod_base = OTHER; note = 2'-O-methyl-adenosine
  modified_base 117..119: mod_base = OTHER; note = nucleotides linked via phosphorothioate
  modified_base 118: mod_base = gm
  modified_base 119: mod_base = OTHER; note = 2'-O-methyl-adenosine
  source 1..119: mol_type = other RNA

SEQ ID NO: 14014 - RNA, 119 nt, synthetic construct; identical to SEQ ID NO: 14008
  modified_base 1..4: mod_base = OTHER; note = nucleotides linked via phosphorothioate
  modified_base 1: mod_base = OTHER; note = 2'-O-methyl-adenosine
  modified_base 2: mod_base = cm
  modified_base 3: mod_base = um
  modified_base 60: mod_base = OTHER; note = 2'-O-methyl-adenosine
  modified_base 61: mod_base = OTHER; note = 2'-O-methyl-adenosine
  modified_base 62: mod_base = OTHER; note = 2'-O-methyl-adenosine
  modified_base 63: mod_base = gm
  modified_base 64: mod_base = cm
  modified_base 65: mod_base = cm
  modified_base 66: mod_base = gm
  modified_base 67: mod_base = cm
  modified_base 68: mod_base = um
  modified_base 69: mod_base = um
  modified_base 70: mod_base = OTHER; note = 2'-O-methyl-adenosine
  modified_base 71: mod_base = cm
  modified_base 72: mod_base = gm
  modified_base 73: mod_base = gm
  modified_base 74: mod_base = OTHER; note = 2'-O-methyl-adenosine
  modified_base 75: mod_base = cm
  modified_base 76: mod_base = um
  modified_base 77: mod_base = um
  modified_base 78: mod_base = cm
  modified_base 79: mod_base = gm
  modified_base 80: mod_base = gm
  modified_base 81: mod_base = um
  modified_base 82: mod_base = cm
  modified_base 83: mod_base = cm
  modified_base 84: mod_base = gm
  modified_base 85: mod_base = um
  modified_base 86: mod_base = OTHER; note = 2'-O-methyl-adenosine
  modified_base 87: mod_base = OTHER; note = 2'-O-methyl-adenosine
  modified_base 88: mod_base = gm
  modified_base 89: mod_base = OTHER; note = 2'-O-methyl-adenosine
  modified_base 90: mod_base = gm
  modified_base 91: mod_base = gm
  modified_base 92: mod_base = cm
  modified_base 117: mod_base = OTHER; note = 2'-O-methyl-adenosine
  modified_base 117..119: mod_base = OTHER; note = nucleotides linked via phosphorothioate
  modified_base 118: mod_base = gm
  modified_base 119: mod_base = OTHER; note = 2'-O-methyl-adenosine
  source 1..119: mol_type = other RNA

SEQ ID NO: 14015 - RNA, 119 nt, synthetic construct
  source 1..119: mol_type = other RNA
actggcgcttctatctgattactctgagcgccatcaccagcgactatgtcgtagtgggtaaagccgcttacggacttcggtccgtaagaggcatcagagtggcttcctggtgaagatga

SEQ ID NO: 14016 - RNA, 119 nt, synthetic construct; identical to SEQ ID NO: 14015
  modified_base 1..4: mod_base = OTHER; note = nucleotides linked via phosphorothioate
  modified_base 1: mod_base = OTHER; note = 2'-O-methyl-adenosine
  modified_base 2: mod_base = cm
  modified_base 3: mod_base = um
  modified_base 117: mod_base = um
  modified_base 117..119: mod_base = OTHER; note = nucleotides linked via phosphorothioate
  modified_base 118: mod_base = gm
  modified_base 119: mod_base = OTHER; note = 2'-O-methyl-adenosine
  source 1..119: mol_type = other RNA

SEQ ID NO: 14017 - RNA, 122 nt, synthetic construct
  modified_base 1..4: mod_base = OTHER; note = nucleotides linked via phosphorothioate
  modified_base 1: mod_base = OTHER; note = 2'-O-methyl-adenosine
  modified_base 2: mod_base = cm
  modified_base 3: mod_base = um
  modified_base 119..122: mod_base = OTHER; note = nucleotides linked via phosphorothioate
  modified_base 120: mod_base = um
  modified_base 121: mod_base = um
  modified_base 122: mod_base = um
  source 1..122: mol_type = other RNA
actggcgcttctatctgattactctgagcgccatcaccagcgactatgtcgtagtgggtaaagccgcttacggacttcggtccgtaagaggcatcagagtggcttcctggtgaagatgattt

SEQ ID NO: 14018 - RNA, 119 nt, synthetic construct; identical to SEQ ID NO: 14015
  modified_base 1..4: mod_base = OTHER; note = nucleotides linked via phosphorothioate
  modified_base 1: mod_base = OTHER; note = 2'-O-methyl-adenosine
  modified_base 2: mod_base = cm
  modified_base 3: mod_base = um
  modified_base 4: mod_base = gm
  modified_base 5: mod_base = gm
  modified_base 6: mod_base = cm
  modified_base 7: mod_base = gm
  modified_base 8: mod_base = cm
  modified_base 9: mod_base = um
  modified_base 10: mod_base = um
  modified_base 11: mod_base = cm
  modified_base 12: mod_base = um
  modified_base 13: mod_base = OTHER; note = 2'-O-methyl-adenosine
  modified_base 14: mod_base = um
  modified_base 15: mod_base = cm
  modified_base 16: mod_base = um
  modified_base 17: mod_base = gm
  modified_base 18: mod_base = OTHER; note = 2'-O-methyl-adenosine
  modified_base 19: mod_base = um
  modified_base 27: mod_base = OTHER; note = 2'-O-methyl-adenosine
  modified_base 28: mod_base = gm
  modified_base 29: mod_base = cm
  modified_base 30: mod_base = gm
  modified_base 31: mod_base = cm
  modified_base 32: mod_base = cm
  modified_base 33: mod_base = OTHER; note = 2'-O-methyl-adenosine
  modified_base 34: mod_base = um
  modified_base 35: mod_base = cm
  modified_base 36: mod_base = OTHER; note = 2'-O-methyl-adenosine
  modified_base 37: mod_base = cm
  modified_base 38: mod_base = cm
  modified_base 44: mod_base = cm
  modified_base 45: mod_base = um
  modified_base 48: mod_base = gm
  modified_base 49: mod_base = um
  modified_base 50: mod_base = cm
  modified_base 51: mod_base = gm
  modified_base 57: mod_base = gm
  modified_base 58: mod_base = gm
  modified_base 59: mod_base = um
  modified_base 60: mod_base = OTHER; note = 2'-O-methyl-adenosine
  modified_base 61: mod_base = OTHER; note = 2'-O-methyl-adenosine
  modified_base 62: mod_base = OTHER; note = 2'-O-methyl-adenosine
  modified_base 63: mod_base = gm
  modified_base 64: mod_base = cm
  modified_base 65: mod_base = cm
  modified_base 66: mod_base = gm
  modified_base 67: mod_base = cm
  modified_base 68: mod_base = um
  modified_base 69: mod_base = um
  modified_base 70: mod_base = OTHER; note = 2'-O-methyl-adenosine
  modified_base 71: mod_base = cm
  modified_base 72: mod_base = gm
  modified_base 73: mod_base = gm
  modified_base 74: mod_base = OTHER; note = 2'-O-methyl-adenosine
  modified_base 75: mod_base = cm
  modified_base 76: mod_base = um
  modified_base 77: mod_base = um
  modified_base 78: mod_base = cm
  modified_base 79: mod_base = gm
  modified_base 80: mod_base = gm
  modified_base 81: mod_base = um
  modified_base 82: mod_base = cm
  modified_base 83: mod_base = cm
  modified_base 84: mod_base = gm
  modified_base 85: mod_base = um
  modified_base 86: mod_base = OTHER; note = 2'-O-methyl-adenosine
  modified_base 87: mod_base = OTHER; note = 2'-O-methyl-adenosine
  modified_base 88: mod_base = gm
  modified_base 89: mod_base = OTHER; note = 2'-O-methyl-adenosine
  modified_base 90: mod_base = gm
  modified_base 91: mod_base = gm
  modified_base 92: mod_base = cm
  modified_base 93: mod_base = OTHER; note = 2'-O-methyl-adenosine
  modified_base 94: mod_base = um
  modified_base 95: mod_base = cm
  modified_base 96: mod_base = OTHER; note = 2'-O-methyl-adenosine
  modified_base 117: mod_base = um
  modified_base 117..119: mod_base = OTHER; note = nucleotides linked via phosphorothioate
  modified_base 118: mod_base = gm
  modified_base 119: mod_base = OTHER; note = 2'-O-methyl-adenosine
  source 1..119: mol_type = other RNA

SEQ ID NO: 14019 - RNA, 119 nt, synthetic construct; identical to SEQ ID NO: 14015
  modified_base 1..4: mod_base = OTHER; note = nucleotides linked via phosphorothioate
  modified_base 1: mod_base = OTHER; note = 2'-O-methyl-adenosine
  modified_base 2: mod_base = cm
  modified_base 3: mod_base = um
  modified_base 4: mod_base = gm
  modified_base 5: mod_base = gm
  modified_base 6: mod_base = cm
  modified_base 7: mod_base = gm
  modified_base 8: mod_base = cm
  modified_base 13: mod_base = OTHER; note = 2'-O-methyl-adenosine
  modified_base 14: mod_base = um
  modified_base 15: mod_base = cm
  modified_base 16: mod_base = um
  modified_base 17: mod_base = gm
  modified_base 18: mod_base = OTHER; note = 2'-O-methyl-adenosine
  modified_base 19: mod_base = um
  modified_base 27: mod_base = OTHER; note = 2'-O-methyl-adenosine
  modified_base 28: mod_base = gm
  modified_base 29: mod_base = cm
  modified_base 30: mod_base = gm
  modified_base 31: mod_base = cm
  modified_base 32: mod_base = cm
  modified_base 33: mod_base = OTHER; note = 2'-O-methyl-adenosine
  modified_base 34: mod_base = um
  modified_base 35: mod_base = cm
  modified_base 36: mod_base = OTHER; note = 2'-O-methyl-adenosine
  modified_base 37: mod_base = cm
  modified_base 38: mod_base = cm
  modified_base 44: mod_base = cm
  modified_base 45: mod_base = um
  modified_base 48: mod_base = gm
  modified_base 49: mod_base = um
  modified_base 50: mod_base = cm
  modified_base 51: mod_base = gm
  modified_base 57: mod_base = gm
  modified_base 58: mod_base = gm
  modified_base 59: mod_base = um
  modified_base 60: mod_base = OTHER; note = 2'-O-methyl-adenosine
  modified_base 61: mod_base = OTHER; note = 2'-O-methyl-adenosine
  modified_base 62: mod_base = OTHER; note = 2'-O-methyl-adenosine
  modified_base 63: mod_base = gm
  modified_base 64: mod_base = cm
  modified_base 65: mod_base = cm
  modified_base 66: mod_base = gm
  modified_base 67: mod_base = cm
  modified_base 68: mod_base = um
  modified_base 69: mod_base = um
  modified_base 70: mod_base = OTHER; note = 2'-O-methyl-adenosine
  modified_base 71: mod_base = cm
  modified_base 72: mod_base = gm
  modified_base 73: mod_base = gm
  modified_base 74: mod_base = OTHER; note = 2'-O-methyl-adenosine
  modified_base 75: mod_base = cm
  modified_base 76: mod_base = um
  modified_base 77: mod_base = um
  modified_base 78: mod_base = cm
  modified_base 79: mod_base = gm
  modified_base 80: mod_base = gm
  modified_base 81: mod_base = um
  modified_base 82: mod_base = cm
  modified_base 83: mod_base = cm
  modified_base 84: mod_base = gm
  modified_base 85: mod_base = um
  modified_base 86: mod_base = OTHER; note = 2'-O-methyl-adenosine
  modified_base 87: mod_base = OTHER; note = 2'-O-methyl-adenosine
  modified_base 88: mod_base = gm
  modified_base 89: mod_base = OTHER; note = 2'-O-methyl-adenosine
  modified_base 90: mod_base = gm
  modified_base 91: mod_base = gm
  modified_base 92: mod_base = cm
  modified_base 93: mod_base = OTHER; note = 2'-O-methyl-adenosine
  modified_base 94: mod_base = um
  modified_base 117: mod_base = um
  modified_base 117..119: mod_base = OTHER; note = nucleotides linked via phosphorothioate
  modified_base 118: mod_base = gm
  modified_base 119: mod_base = OTHER; note = 2'-O-methyl-adenosine
  source 1..119: mol_type = other RNA

SEQ ID NO: 14020 - RNA, 119 nt, synthetic construct; identical to SEQ ID NO: 14015
  modified_base 1..4: mod_base = OTHER; note = nucleotides linked via phosphorothioate
  modified_base 1: mod_base = OTHER; note = 2'-O-methyl-adenosine
  modified_base 2: mod_base = cm
  modified_base 3: mod_base = um
  modified_base 44: mod_base = cm
  modified_base 45: mod_base = um
  modified_base 48: mod_base = gm
  modified_base 49: mod_base = um
  modified_base 50: mod_base = cm
  modified_base 51: mod_base = gm
  modified_base 60: mod_base = OTHER; note = 2'-O-methyl-adenosine
  modified_base 61: mod_base = OTHER; note = 2'-O-methyl-adenosine
  modified_base 62: mod_base = OTHER; note = 2'-O-methyl-adenosine
  modified_base 63: mod_base = gm
  modified_base 64: mod_base = cm
  modified_base 65: mod_base = cm
  modified_base 66: mod_base = gm
  modified_base 67: mod_base = cm
  modified_base 68: mod_base = um
  modified_base 69: mod_base = um
  modified_base 70: mod_base = OTHER; note = 2'-O-methyl-adenosine
  modified_base 71: mod_base = cm
  modified_base 72: mod_base = gm
  modified_base 73: mod_base = gm
  modified_base 74: mod_base = OTHER; note = 2'-O-methyl-adenosine
  modified_base 75: mod_base = cm
  modified_base 76: mod_base = um
  modified_base 77: mod_base = um
  modified_base 78: mod_base = cm
  modified_base 79: mod_base = gm
  modified_base 80: mod_base = gm
  modified_base 81: mod_base = um
  modified_base 82: mod_base = cm
  modified_base 83: mod_base = cm
  modified_base 84: mod_base = gm
  modified_base 85: mod_base = um
  modified_base 86: mod_base = OTHER; note = 2'-O-methyl-adenosine
  modified_base 87: mod_base = OTHER; note = 2'-O-methyl-adenosine
  modified_base 88: mod_base = gm
  modified_base 89: mod_base = OTHER; note = 2'-O-methyl-adenosine
  modified_base 90: mod_base = gm
  modified_base 91: mod_base = gm
  modified_base 92: mod_base = cm
  modified_base 117: mod_base = um
  modified_base 117..119: mod_base = OTHER; note = nucleotides linked via phosphorothioate
  modified_base 118: mod_base = gm
  modified_base 119: mod_base = OTHER; note = 2'-O-methyl-adenosine
  source 1..119: mol_type = other RNA

SEQ ID NO: 14021 - RNA, 119 nt, synthetic construct; identical to SEQ ID NO: 14015
  modified_base 1..4: mod_base = OTHER; note = nucleotides linked via phosphorothioate
  modified_base 1: mod_base = OTHER; note = 2'-O-methyl-adenosine
  modified_base 2: mod_base = cm
  modified_base 3: mod_base = um
  modified_base 60: mod_base = OTHER; note = 2'-O-methyl-adenosine
  modified_base 61: mod_base = OTHER; note = 2'-O-methyl-adenosine
  modified_base 62: mod_base = OTHER; note = 2'-O-methyl-adenosine
  modified_base 63: mod_base = gm
  modified_base 64: mod_base = cm
  modified_base 65: mod_base = cm
  modified_base 66: mod_base = gm
  modified_base 67: mod_base = cm
  modified_base 68: mod_base = um
  modified_base 69: mod_base = um
  modified_base 70: mod_base = OTHER; note = 2'-O-methyl-adenosine
  modified_base 71: mod_base = cm
  modified_base 72: mod_base = gm
  modified_base 73: mod_base = gm
  modified_base 74: mod_base = OTHER; note = 2'-O-methyl-adenosine
  modified_base 75: mod_base = cm
  modified_base 76: mod_base = um
  modified_base 77: mod_base = um
  modified_base 78: mod_base = cm
  modified_base 79: mod_base = gm
  modified_base 80: mod_base = gm
  modified_base 81: mod_base = um
  modified_base 82: mod_base = cm
  modified_base 83: mod_base = cm
  modified_base 84: mod_base = gm
  modified_base 85: mod_base = um
  modified_base 86: mod_base = OTHER; note = 2'-O-methyl-adenosine
  modified_base 87: mod_base = OTHER; note = 2'-O-methyl-adenosine
  modified_base 88: mod_base = gm
  modified_base 89: mod_base = OTHER; note = 2'-O-methyl-adenosine
  modified_base 90: mod_base = gm
  modified_base 91: mod_base = gm
  modified_base 92: mod_base = cm
  modified_base 117: mod_base = um
  modified_base 117..119: mod_base = OTHER; note = nucleotides linked via phosphorothioate
  modified_base 118: mod_base = gm
  modified_base 119: mod_base = OTHER; note = 2'-O-methyl-adenosine
  source 1..119: mol_type = other RNA

SEQ ID NO: 14022 - RNA, 109 nt, synthetic construct
  source 1..109: mol_type = other RNA
actggcgcttctatctgattactctgagcgccatcaccagcgactatgtcgtagtgggtaaagctccctcttcggagggagcatcagagctggcttcttggtgaagatg

SEQ ID NO: 14023 - RNA, 109 nt, synthetic construct; identical to SEQ ID NO: 14022
  modified_base 1..4: mod_base = OTHER; note = nucleotides linked via phosphorothioate
  modified_base 1: mod_base = OTHER; note = 2'-O-methyl-adenosine
  modified_base 2: mod_base = cm
  modified_base 3: mod_base = um
  modified_base 106..109: mod_base = OTHER; note = nucleotides linked via phosphorothioate
  modified_base 107: mod_base = OTHER; note = 2'-O-methyl-adenosine
  modified_base 108: mod_base = um
  modified_base 109: mod_base = gm
  source 1..109: mol_type = other RNA

SEQ ID NO: 14024 - RNA, 109 nt, synthetic construct; identical to SEQ ID NO: 14022
  modified_base 1..4: mod_base = OTHER; note = nucleotides linked via phosphorothioate
  modified_base 1: mod_base = OTHER; note = 2'-O-methyl-adenosine
  modified_base 2: mod_base = cm
  modified_base 3: mod_base = um
  modified_base 6: mod_base = cm
  modified_base 8: mod_base = cm
  modified_base 9: mod_base = um
  modified_base 14: mod_base = um
  modified_base 15: mod_base = cm
  modified_base 27: mod_base = OTHER; note = 2'-O-methyl-adenosine
  modified_base 28: mod_base = gm
  modified_base 33: mod_base = OTHER; note = 2'-O-methyl-adenosine
  modified_base 34: mod_base = um
  modified_base 35: mod_base = cm
  modified_base 36: mod_base = OTHER; note = 2'-O-methyl-adenosine
  modified_base 37: mod_base = cm
  modified_base 42: mod_base = gm
  modified_base 43: mod_base = OTHER; note = 2'-O-methyl-adenosine
  modified_base 44: mod_base = cm
  modified_base 45: mod_base = um
  modified_base 48: mod_base = gm
  modified_base 49: mod_base = um
  modified_base 50: mod_base = cm
  modified_base 51: mod_base = gm
  modified_base 58: mod_base = gm
  modified_base 59: mod_base = um
  modified_base 60: mod_base = OTHER; note = 2'-O-methyl-adenosine
  modified_base 61: mod_base = OTHER; note = 2'-O-methyl-adenosine
  modified_base 63: mod_base = gm
  modified_base 64: mod_base = cm
  modified_base 65: mod_base = um
  modified_base 66: mod_base = cm
  modified_base 67: mod_base = cm
  modified_base 68: mod_base = cm
  modified_base 69: mod_base = um
  modified_base 70: mod_base = cm
  modified_base 71: mod_base = um
  modified_base 72: mod_base = um
  modified_base 73: mod_base = cm
  modified_base 74: mod_base = gm
  modified_base 75: mod_base = gm
  modified_base 76: mod_base = OTHER; note = 2'-O-methyl-adenosine
  modified_base 77: mod_base = gm
  modified_base 78: mod_base = gm
  modified_base 79: mod_base = gm
  modified_base 80: mod_base = OTHER; note = 2'-O-methyl-adenosine
  modified_base 81: mod_base = gm
  modified_base 82: mod_base = cm
  modified_base 83: mod_base = OTHER; note = 2'-O-methyl-adenosine
  modified_base 84: mod_base = um
  modified_base 106..109: mod_base = OTHER; note = nucleotides linked via phosphorothioate
  modified_base 107: mod_base = OTHER; note = 2'-O-methyl-adenosine
  modified_base 108: mod_base = um
  modified_base 109: mod_base = gm
  source 1..109: mol_type = other RNA

SEQ ID NO: 14025 - RNA, 109 nt, synthetic construct; identical to SEQ ID NO: 14022
  modified_base 1..4: mod_base = OTHER; note = nucleotides linked via phosphorothioate
  modified_base 1: mod_base = OTHER; note = 2'-O-methyl-adenosine
  modified_base 2: mod_base = cm
  modified_base 3: mod_base = um
  modified_base 33: mod_base = OTHER; note = 2'-O-methyl-adenosine
  modified_base 34: mod_base = um
  modified_base 35: mod_base = cm
  modified_base 36: mod_base = OTHER; note = 2'-O-methyl-adenosine
  modified_base 37: mod_base = cm
  modified_base 42: mod_base = gm
  modified_base 43: mod_base = OTHER; note = 2'-O-methyl-adenosine
  modified_base 44: mod_base = cm
  modified_base 45: mod_base = um
  modified_base 48: mod_base = gm
  modified_base 49: mod_base = um
  modified_base 50: mod_base = cm
  modified_base 51: mod_base = gm
  modified_base 58: mod_base = gm
  modified_base 59: mod_base = um
  modified_base 60: mod_base = OTHER; note = 2'-O-methyl-adenosine
  modified_base 61: mod_base = OTHER; note = 2'-O-methyl-adenosine
  modified_base 63: mod_base = gm
  modified_base 64: mod_base = cm
  modified_base 65: mod_base = um
  modified_base 66: mod_base = cm
  modified_base 67: mod_base = cm
  modified_base 68: mod_base = cm
  modified_base 69: mod_base = um
  modified_base 70: mod_base = cm
  modified_base 71: mod_base = um
  modified_base 72: mod_base = um
  modified_base 73: mod_base = cm
  modified_base 74: mod_base = gm
  modified_base 75: mod_base = gm
  modified_base 76: mod_base = OTHER; note = 2'-O-methyl-adenosine
  modified_base 77: mod_base = gm
  modified_base 78: mod_base = gm
  modified_base 79: mod_base = gm
  modified_base 80: mod_base = OTHER; note = 2'-O-methyl-adenosine
  modified_base 81: mod_base = gm
  modified_base 82: mod_base = cm
  modified_base 83: mod_base = OTHER; note = 2'-O-methyl-adenosine
  modified_base 84: mod_base = um
  modified_base 106..109: mod_base = OTHER; note = nucleotides linked via phosphorothioate
  modified_base 107: mod_base = OTHER; note = 2'-O-methyl-adenosine
  modified_base 108: mod_base = um
  modified_base 109: mod_base = gm
  source 1..109: mol_type = other RNA

SEQ ID NO: 14026 - RNA, 109 nt, synthetic construct; identical to SEQ ID NO: 14022
  modified_base 1..4: mod_base = OTHER; note = nucleotides linked via phosphorothioate
  modified_base 1: mod_base = OTHER; note = 2'-O-methyl-adenosine
  modified_base 2: mod_base = cm
  modified_base 3: mod_base = um
  modified_base 6: mod_base = cm
  modified_base 8: mod_base = cm
  modified_base 9: mod_base = um
  modified_base 14: mod_base = um
  modified_base 15: mod_base = cm
  modified_base 27: mod_base = OTHER; note = 2'-O-methyl-adenosine
  modified_base 28: mod_base = gm
  modified_base 42: mod_base = gm
  modified_base 43: mod_base = OTHER; note = 2'-O-methyl-adenosine
  modified_base 44: mod_base = cm
  modified_base 45: mod_base = um
  modified_base 48: mod_base = gm
  modified_base 49: mod_base = um
  modified_base 50: mod_base = cm
  modified_base 51: mod_base = gm
  modified_base 63: mod_base = gm
  modified_base 64: mod_base = cm
  modified_base 65: mod_base = um
  modified_base 66: mod_base = cm
  modified_base 67: mod_base = cm
  modified_base 68: mod_base = cm
  modified_base 69: mod_base = um
  modified_base 70: mod_base = cm
  modified_base 71: mod_base = um
  modified_base 72: mod_base = um
  modified_base 73: mod_base = cm
  modified_base 74: mod_base = gm
  modified_base 75: mod_base = gm
  modified_base 76: mod_base = OTHER; note = 2'-O-methyl-adenosine
  modified_base 77: mod_base = gm
  modified_base 78: mod_base = gm
  modified_base 79: mod_base = gm
  modified_base 80: mod_base = OTHER; note = 2'-O-methyl-adenosine
  modified_base 81: mod_base = gm
  modified_base 82: mod_base = cm
  modified_base 105..109: mod_base = OTHER; note = nucleotides linked via phosphorothioate
  modified_base 106: mod_base = gm
  modified_base 107: mod_base = OTHER; note = 2'-O-methyl-adenosine
  modified_base 108: mod_base = um
  modified_base 109: mod_base = gm
  source 1..109: mol_type = other RNA

SEQ ID NO: 14027 - RNA, 109 nt, synthetic construct
  source 1..109: mol_type = other RNA
actggcgcttttatctgattactttgagagccatcaccagcgactatgtcgtagtgggtaaagctccctcttcggagggagcatcaaagagaagatgggcgggagtctt

SEQ ID NO: 14028 - RNA, 112 nt, synthetic construct
  modified_base 1..4: mod_base = OTHER; note = nucleotides linked via phosphorothioate
  modified_base 1: mod_base = OTHER; note = 2'-O-methyl-adenosine
  modified_base 2: mod_base = cm
  modified_base 3: mod_base = um
  modified_base 109..112: mod_base = OTHER; note = nucleotides linked via phosphorothioate
  modified_base 110: mod_base = um
  modified_base 111: mod_base = um
  modified_base 112: mod_base = um
  source 1..112: mol_type = other RNA
actggcgcttttatctgattactttgagagccatcaccagcgactatgtcgtagtgggtaaagctccctcttcggagggagcatcaaagagaagatgggcgggagtcttttt

SEQ ID NO: 14029 - RNA, 109 nt, synthetic construct
  source 1..109: mol_type = other RNA
actggcgcttctatctgattactctgagcgccatcaccagcgactatgtcgtagtgggtaaagctccctcttcggagggagcatcagagagaagatgggcgggagtctt

SEQ ID NO: 14030 - RNA, 109 nt, synthetic construct; identical to SEQ ID NO: 14029
  modified_base 1..4: mod_base = OTHER; note = nucleotides linked via phosphorothioate
  modified_base 1: mod_base = OTHER; note = 2'-O-methyl-adenosine
  modified_base 2: mod_base = cm
  modified_base 3: mod_base = um
  modified_base 106..109: mod_base = OTHER; note = nucleotides linked via phosphorothioate
  modified_base 107: mod_base = cm
  modified_base 108: mod_base = um
  modified_base 109: mod_base = um
  source 1..109: mol_type = other RNA

SEQ ID NO: 14031 - RNA, 109 nt, synthetic construct; identical to SEQ ID NO: 14029
  modified_base 1..4: mod_base = OTHER; note = nucleotides linked via phosphorothioate
  modified_base 1: mod_base = OTHER; note = 2'-O-methyl-adenosine
  modified_base 2: mod_base = cm
  modified_base 3: mod_base = um
  modified_base 44: mod_base = cm
  modified_base 45: mod_base = um
  modified_base 48: mod_base = gm
  modified_base 49: mod_base = um
  modified_base 50: mod_base = cm
  modified_base 51: mod_base = gm
  modified_base 63: mod_base = gm
  modified_base 64: mod_base = cm
  modified_base 65: mod_base = um
  modified_base 66: mod_base = cm
  modified_base 67: mod_base = cm
  modified_base 68: mod_base = cm
  modified_base 69: mod_base = um
  modified_base 70: mod_base = cm
  modified_base 71: mod_base = um
  modified_base 72: mod_base = um
  modified_base 73: mod_base = cm
  modified_base 74: mod_base = gm
  modified_base 75: mod_base = gm
  modified_base 76: mod_base = OTHER; note = 2'-O-methyl-adenosine
  modified_base 77: mod_base = gm
  modified_base 78: mod_base = gm
  modified_base 79: mod_base = gm
  modified_base 80: mod_base = OTHER; note = 2'-O-methyl-adenosine
  modified_base 81: mod_base = gm
  modified_base 82: mod_base = cm
  modified_base 106..109: mod_base = OTHER; note = nucleotides linked via phosphorothioate
  modified_base 107: mod_base = cm
  modified_base 108: mod_base = um
  modified_base 109: mod_base = um
  source 1..109: mol_type = other RNA

SEQ ID NO: 14032 - DNA, 60 bp, synthetic construct
  source 1..60: mol_type = other DNA
  misc_feature 1: note = IRDye700 moiety conjugated
catgtcttccatggccttcttcctggcttcctggtgaagatgagtggcgacctgctggag

SEQ ID NO: 14033 - DNA, 60 bp, synthetic construct
  source 1..60: mol_type = other DNA
  misc_feature 1: note = IRDye800 moiety conjugated
ctccagcaggtcgccactcatcttcaccaggaagccaggaagaaggccatggaagacatg

SEQ ID NO: 14034 - DNA, 14 bp, synthetic construct
  source 1..14: mol_type = other DNA
gaccggccgccacc

SEQ ID NO: 14035 - DNA, 39 bp, synthetic construct
  source 1..39: mol_type = other DNA
atggccccagcggccaaacgggtgaagctggactctaga

SEQ ID NO: 14036 - DNA, 42 bp, synthetic construct
  source 1..42: mol_type = other DNA
ggctcccccgccgcgaagcgagtgaaactggacggatccggc

SEQ ID NO: 14037 - DNA, 756 bp, synthetic construct
  source 1..756: mol_type = other DNA
gcaacaaacttctctctgctgaaacaagccggagatgtcgaagagaatcctggaccgatggtatcaaagggtgaggcggtcattaaggaattcatgcggttcaaagttcacatggaggggagtatgaatggtcacgaatttgagatcgagggtgagggagagggtagaccttacgaaggcacccagacagcaaaactcaaagtcactaagggcggcccactccctttctcatgggatatactgagtcctcaatttatgtatggctcccgggcctttatcaagcatccagccgacatacccgattactataaacagtcattccccgagggattcaaatgggagagagtgatgaattttgaagacgggggtgccgtgaccgtaactcaagatacctctttggaagatggtaccctcatttacaaggttaagcttagaggaactaatttcccaccagacggacccgttatgcagaaaaaaaccatgggttgggaggctagcaccgaacggctgtatccagaggatggagttttgaaaggtgatattaagatggccctgcgcctgaaagacggagggcggtacctcgcagatttcaaaactacctacaaagctaagaaaccggtccaaatgccgggtgcttataacgtcgataggaagctggatataacatcacacaacgaagactatacggttgtcgaacagtatgagcgatctgaggggaggcacagcacgggcgggatggatgagctttacaagtga

SEQ ID NO: 14038 - DNA, 44 bp, synthetic construct
  source 1..44: mol_type = other DNA
aaataagagagaaaagaagagtaagaagaaatataagagccacc

SEQ ID NO: 14039 - DNA, 39 bp, synthetic construct
  source 1..39: mol_type = other DNA
atggcccctgctgccaagagagtgaagctggatagcaga

SEQ ID NO: 14040 - DNA, 2937 bp, synthetic construct
  source 1..2937: mol_type = other DNA
caggagatcaagcggattaataaaattcggagaagactggtgaaggattctaacacaaagaaggctggcaagacacggggccctatgaagacactgctggtgagagtgatgacacccgacctgagagaaagactggaaaacctgagaaagaagcctgagaatatcccccagcccatcagcaacacaagccgggccaacctgaataagctgctgaccgactacaccgaaatgaagaaggccatcctgcacgtgtattgggaagagttccagaaagacccagtcggcctgatgagcagagtggctcagcctgccagcaagaagatcgatcagaacaagctgaagcccgaaatggacgagaaggggaacctgacaaccgccggctttgcctgtagccagtgcggccagcccctgtttgtgtacaaactggaacaggtgagcgaaaagggcaaggcttacacgaattacttcggcagatgcaacgtggccgagcacgagaagctgatcaagctggcccagctgaagcctgagaaggatagcgatgaggcagtgacatattccctgggcaagttcggacagcgggccctggatttttattccattcatgtgaccaaggaatccacccaccccgtcaagcctcttgcccaaattgccggcaacagatacgcctccagccccgtgggcaaggccctgagcgacgcctgtatgggcaccatcgccagcttcctgtctaagtaccaggacattatcatcgagcaccagaaggtggtgaagggcaaccagaagagactggagagcctgcgcgagctggccggcaaggaaaacctggagtatcctagcgtgaccctgcctcctcagcctcatacaaaggagggcgtggatgcctacaacgaagtgatcgcccgggtgcggatgtgggtgaacctgaatctgtggcagaagctgaagctgtctagagacgacgccaagcccctgctgagactgaagggcttccccagcttccctctggtggagagacaggcaaatgaagtggactggtgggacatggtgtgtaacgtgaagaagctgatcaatgagaagaaggaggacggcaaagtgttctggcagaatctggccggctacaagcgtcaggaggccctgcggccctacctgagcagcgaggaagacagaaagaagggcaagaagttcgcccggtatcagctgggggacctgctgctgcacctcgagaagaagcacggcgaagactgggggaaggtgtacgatgaggcctgggagcggatcgataagaaggtggagggcctgagcaagcacatcaagctggaggaggaacggagatctgaggacgcccagagcaaggccgccctgaccgactggctgagagccaaggccagcttcgtcatcgaggggctgaaggaggccgacaaggacgagttctgccggtgcgaactgaagctgcagaagtggtacggagatctgagaggcaaacctttcgccatcgaggccgagaacagcatcctggacatcagcggcttcagcaagcagtacaactgcgcctttatttggcagaaggacggagtgaagaagctgaacctgtacctgatcatcaactatttcaagggcggcaagctgagattcaagaagatcaagcctgaagccttcgaggccaacagattctacaccgtgattaacaagaaaagcggagagatcgtgccaatggaagtgaacttcaacttcgacgaccctaacctgatcatcctgcccctggcatttggcaagcggcagggcagagagttcatctggaacgacctgctgtctctggagaccggcagcctgaagctggccaacggcagagtgatcgagaagacactgtacaacagacgaaccagacaagacgagcccgccctgtttgtggccctgaccttcgagagaagagaggtgctggacagcagcaatatcaagcctatgaacctgatcggcgtggaccggggcgagaacatccctgccgtgatcgcccttaccgaccccgagggatgccctctgagccggtttaaagacagcctgggcaaccctacccacatcctgagaattggcgagtcctacaaggagaagcagagaaccatccaggccaagaaggaggtggagcagcggcgggctggcggctactcccggaagtacgccagcaaggccaagaacctggccgacgacatggttagaaataccgccagagacctcctgtactacgctgtgacccaggacgccatgctgatcttcgagaacctgagcagaggcttcggcagacagggcaagagaaccttcatggccgagagacagtacacccggatggaggactggctgaccgccaagctggcctacgagggcctgccctctaagacctacctgtccaagaccttggcacagtacaccagcaagacatgctctaactgcggcttcacaatcacgagcgccgactacgaccgggtgctggagaaactgaagaagaccgccacaggctggatgaccaccattaacggcaaggagctgaaggtggagggccagatcacctactacaacaggtacaaacggcagaacgtggtgaaggacctgagcgtggaactggatagactgagcgaggaaagcgtaaacaatgacatcagcagctggaccaagggccggagcggcgaggccctgagcctgctgaagaagagattctcccacagaccagtgcaggagaagttcgtgtgtctgaactgcggcttcgagacccacgccgacgagcaagccgccctgaacatcgcccggtcttggcttttcctgcggagccaggagtacaagaagtaccagacaaacaagaccacaggcaacacagacaagagagccttcgtcgagacctggcagagcttctacagaaagaagctgaaggaggtgtggaagcctgccgtg

SEQ ID NO: 14041 - DNA, 43 bp, synthetic construct
  source 1..43: mol_type = other DNA
ggaagccccgctgccaagagagtgaagctggactaatagataa

SEQ ID NO: 14042 - DNA, 93 bp, synthetic construct
  source 1..93: mol_type = other DNA
gctgccttctgcggggcttgccttctggccatgcccttcttctctcccttgcacctgtacctcttggtctttgaataaagcctgagtaggaag

SEQ ID NO: 14043 - skipped

SEQ ID NO: 14044 - DNA, 80 bp, synthetic construct
  source 1..80: mol_type = other DNA
aaaaaaaaaaaaaaaaaaaaaaaaaaaaaaaaaaaaaaaaaaaaaaaaaaaaaaaaaaaaaaaaaaaaaaaaaaaaaaaa

SEQ ID NO: 14045 - DNA, 40 bp, synthetic construct
  source 1..40: mol_type = other DNA
actcttctggtccccacagactcagagagaacccgccacc

SEQ ID NO: 14046 - DNA, 111 bp, synthetic construct
  source 1..111: mol_type = other DNA
gctggagcctcggtggccatgcttcttgccccttgggcctccccccagcccctcctccccttcctgcacccgtacccccgtggtctttgaataaagtctgagtgggcggca

SEQ ID NO: 14047 - DNA, 120 bp, synthetic construct
  source 1..120: mol_type = other DNA
aaaaaaaaaaaaaaaaaaaaaaaaaaaaaaaaaaaaaaaaaaaaaaaaaaaaaaaaaaaaaaaaaaaaaaaaaaaaaaaaaaaaaaaaaaaaaaaaaaaaaaaaaaaaaaaaaaaaaaaa

SEQ ID NO: 14048 - DNA, 126 bp, synthetic construct
  source 1..126: mol_type = other DNA
aaaaaaaaaaaaaaaaaaaaaaaaaaaaaaaaaaaaaaaaaaaaaaaaaaaaaaaaaaaagcatgcaaaaaaaaaaaaaaaaaaaaaaaaaaaaaaaaaaaaaaaaaaaaaaaaaaaaaaaaaaaa

SEQ ID NO: 14049 - DNA, 34 bp, synthetic construct
  source 1..34: mol_type = other DNA
actcttctggtccccacagactcagagagaaccc

SEQ ID NO: 14050 - DNA, 44 bp, synthetic construct
  source 1..44: mol_type = other DNA
acatttgcttctgacacaactgtgttcactagcaacctcaaaca

SEQ ID NO: 14051 - DNA, 35 bp, synthetic construct
  source 1..35: mol_type = other DNA
ctagcttttctcttctgtcaaccccacacgccttt

SEQ ID NO: 14052 - DNA, 27 bp, synthetic construct
  source 1..27: mol_type = other DNA
ctcccgggctggcagcagggccccagc

SEQ ID NO: 14053 - DNA, 55 bp, synthetic construct
  source 1..55: mol_type = other DNA
actcctccccatcctctccctctgtccctctgtccctctgaccctgcactgtccc

SEQ ID NO: 14054 - DNA, 414 bp, synthetic construct
  source 1..414: mol_type = other DNA
catcacatttaaaagcatctcagcctaccatgagaataagagaaagaaaatgaagatcaaaagcttattcatctgtttttctttttcgttggtgtaaagccaacaccctgtctaaaaaacataaatttctttaatcattttgcctcttttctctgtgcttcaattaataaaaaatggaaagaatctaatagagtggtacagcactgttatttttcaaagatgtgttgctatcctgaaaattctgtaggttctgtggaagttccagtgttctctcttattccacttcggtagaggatttctagtttcttgtgggctaattaaataaatcattaatactcttctaagttatggattataaacattcaaaataatattttgacattatgataattctgaataaaagaacaaaaacca

SEQ ID NO: 14055 - DNA, 193 bp, synthetic construct
  source 1..193: mol_type = other DNA
gcatcacatttaaaagcatctcagcctaccatgagaataagagaaagaaaatgaagatcaatagcttattcatctctttttctttttcgttggtgtaaagccaacaccctgtctaaaaaacataaatttctttaatcattttgcctcttttctctgtgcttcaattaataaaaaatggaaagaacctagatct

SEQ ID NO: 14056 - DNA, 134 bp, synthetic construct
  source 1..134: mol_type = other DNA
gctcgctttcttgctgtccaatttctattaaaggttcctttgttccctaagtccaactactaaactgggggatattatgaagggccttgagcatctggattctgcctaataaaaaacatttattttcattgcaa

SEQ ID NO: 14057 - DNA, 245 bp, synthetic construct
  source 1..245: mol_type = other DNA
gctggagcctcggtggccatgcttcttgccccttgggcctccccccagcccctcctccccttcctgcacccgtacccccgtggtctttgaataaagtctgagtgggcggcagctcgctttcttgctgtccaatttctattaaaggttcctttgttccctaagtccaactactaaactgggggatattatgaagggccttgagcatctggattctgcctaataaaaaacatttattttcattgcaa

SEQ ID NO: 14058 - DNA, 245 bp, synthetic construct
  source 1..245: mol_type = other DNA
gctcgctttcttgctgtccaatttctattaaaggttcctttgttccctaagtccaactactaaactgggggatattatgaagggccttgagcatctggattctgcctaataaaaaacatttattttcattgcaagctggagcctcggtggccatgcttcttgccccttgggcctccccccagcccctcctccccttcctgcacccgtacccccgtggtctttgaataaagtctgagtgggcggca

SEQ ID NO: 14059 - skipped

SEQ ID NO: 14060 - DNA, 27 bp, synthetic construct
  source 1..27: mol_type = other DNA
cccgccgcgaagcgagtgaaactggac

SEQ ID NO: 14061 - DNA, 30 bp, synthetic construct
  source 1..30: mol_type = other DNA
gaattcctagagctcgctgatcagcctcga

SEQ ID NO: 14062 - skipped

SEQ ID NO: 14063 - DNA, 20 bp, synthetic construct
  source 1..20: mol_type = other DNA
agaagatgggcgggagtctt

SEQ ID NO: 14064 - DNA, 14 bp, synthetic construct
  source 1..14: mol_type = other DNA
tttttggcggccgc

SEQ ID NO: 14065 - DNA, 99 bp, synthetic construct
  source 1..99: mol_type = other DNA
actgggccttctatctgattactctgaggcccatcaccagcgactatgtcgtagtgggtaaagccgcttagggacttcggtccctaagaggcatcagag

SEQ ID NO: 14066 - DNA, 97 bp, synthetic construct
  source 1..97: mol_type = other DNA
actgggccttctatctgattactctgaggcccatcaccagcgactatgtcgtagtgggtaaagcccttagggacttcggtccctaagggcatcagag

SEQ ID NO: 14067 - DNA, 99 bp, synthetic construct
  source 1..99: mol_type = other DNA
actgggccttctatctgattactctgaggcccatcaccagcgactatgtcgtagtgggtaaagcctcttagggacttcggtccctaagaggcatcagag

SEQ ID NO: 14068 - DNA, 89 bp, synthetic construct
  source 1..89: mol_type = other DNA
actgggccttctatctgattactctgaggcccatcaccagcgactatgtcgtagtgggtaaagctccctcttcggagggagcatcagag

SEQ ID NO: 14069 - DNA, 97 bp, synthetic construct
  source 1..97: mol_type = other DNA
actgggccttctatctgattactctgaggcccatcaccagcgactatgtcgtagtgggtaaagcccttagggaccttggtccctaagggcatcagag

SEQ ID NO: 14070 - DNA, 99 bp, synthetic construct
  source 1..99: mol_type = other DNA
actgggccttctatctgattactctgaggcccatcaccagcgactatgtcgtagtgggtaaagcctcttagggaccttggtccctaagaggcatcagag

SEQ ID NO: 14071 - DNA, 89 bp, synthetic construct
  source 1..89: mol_type = other DNA
actgggccttctatctgattactctgaggcccatcaccagcgactatgtcgtagtgggtaaagctccctccttggagggagcatcagag

SEQ ID NO: 14072 - DNA, 97 bp, synthetic construct
  source 1..97: mol_type = other DNA
actgggccttctatctgattactctgaggcccatcaccagcgactatgtcgtagtgggtaaagcccttagggaggaaactccctaagggcatcagag

SEQ ID NO: 14073 - DNA, 99 bp, synthetic construct
  source 1..99: mol_type = other DNA
actgggccttctatctgattactctgaggcccatcaccagcgactatgtcgtagtgggtaaagcctcttagggaggaaactccctaagaggcatcagag

SEQ ID NO: 14074 - DNA, 89 bp, synthetic construct
  source 1..89: mol_type = other DNA
actgggccttctatctgattactctgaggcccatcaccagcgactatgtcgtagtgggtaaagctccctggaaacagggagcatcagag

SEQ ID NO: 14075 - DNA, 98 bp, synthetic construct
  source 1..98: mol_type = other DNA
actgggccttctatctgattactctgaggcccatcaccagcgactatgtcgtagtgggtaaagcccttagggacttcaggtccctaagggcatcagag

SEQ ID NO: 14076 - DNA, 100 bp, synthetic construct
  source 1..100: mol_type = other DNA
actgggccttctatctgattactctgaggcccatcaccagcgactatgtcgtagtgggtaaagcctcttagggacttcaggtccctaagaggcatcagag

SEQ ID NO: 14077 - DNA, 90 bp, synthetic construct
  source 1..90: mol_type = other DNA
actgggccttctatctgattactctgaggcccatcaccagcgactatgtcgtagtgggtaaagctccctcttcaggagggagcatcagag

SEQ ID NO: 14078 - DNA, 97 bp, synthetic construct
  source 1..97: mol_type = other DNA
actgggccttctatctgattactctgaggcccatcaccaggcactatgtgctagtgggtaaagcccttagggaccttggtccctaagggcatcagag

SEQ ID NO: 14079 - DNA, 99 bp, synthetic construct
  source 1..99: mol_type = other DNA
actgggccttctatctgattactctgaggcccatcaccaggcactatgtgctagtgggtaaagcctcttagggaccttggtccctaagaggcatcagag

SEQ ID NO: 14080 - DNA, 89 bp, synthetic construct
  source 1..89: mol_type = other DNA
actgggccttctatctgattactctgaggcccatcaccaggcactatgtgctagtgggtaaagctccctccttggagggagcatcagag

SEQ ID NO: 14081 - DNA, 97 bp, synthetic construct
  source 1..97: mol_type = other DNA
actgggccttctatctgattactctgaggcccatcaccaggcactatgtgctagtgggtaaagcccttagggaggaaactccctaagggcatcagag

SEQ ID NO: 14082 - DNA, 99 bp, synthetic construct
  source 1..99: mol_type = other DNA
actgggccttctatctgattactctgaggcccatcaccaggcactatgtgctagtgggtaaagcctcttagggaggaaactccctaagaggcatcagag

SEQ ID NO: 14083 - DNA, 89 bp, synthetic construct
  source 1..89: mol_type = other DNA
actgggccttctatctgattactctgaggcccatcaccaggcactatgtgctagtgggtaaagctccctggaaacagggagcatcagag

SEQ ID NO: 14084 - DNA, 98 bp, synthetic construct
  source 1..98: mol_type = other DNA
actgggccttctatctgattactctgaggcccatcaccaggcactatgtgctagtgggtaaagcccttagggacttcaggtccctaagggcatcagag

SEQ ID NO: 14085 - DNA, 100 bp, synthetic construct
  source 1..100: mol_type = other DNA
actgggccttctatctgattactctgaggcccatcaccaggcactatgtgctagtgggtaaagcctcttagggacttcaggtccctaagaggcatcagag

SEQ ID NO: 14086 - DNA, 90 bp, synthetic construct
  source 1..90: mol_type = other DNA
actgggccttctatctgattactctgaggcccatcaccaggcactatgtgctagtgggtaaagctccctcttcaggagggagcatcagag

SEQ ID NO: 14087 - DNA, 252 bp, synthetic construct
  source 1..252: mol_type = other DNA
aatggaggtggtactatgtagatgagaattcaggagcaaactgggaaaagcaactgcttccaaatatttgtgatttttacagtgtagttttggaaaaactcttagcctaccaattcttctaagtgttttaaaatgtgggagccagtacacatgaagttatagagtgttttaatgaggcttaaatatttactgtaactatgaaatgctacacatatcatgctgttcaggctctgtggccatgcaactcatact

SEQ ID NO: 14088 - DNA, 3006 bp, synthetic construct
  source 1..3006: mol_type = other DNA
atggctccagctgccaagagagtgaagctggactctagacaagagatcaagaggatcaacaagattagaagaaggctggtcaaggacagcaacaccaagaaggcaggcaagacaggccccatgaagaccctgcttgtcagagtgatgacccctgacctgagagagagactggaaaacctgagaaagaagcctgagaacatccctcagcctatctccaacaccagcagagccaacctgaacaagctgctgacagactacacagagatgaagaaagccatcctgcatgtgtactgggaagagttccagaaagaccctgtgggcctgatgagcagagtggcccagcctgccagcaagaagattgaccagaacaaactgaagccagagatggatgagaagggcaacctgaccacagctggctttgcctgctctcagtgtggccagcctctgtttgtgtacaagctggaacaagtgtctgagaaaggcaaggcctacaccaactactttggcagatgcaatgtggctgagcatgagaagctgatcctgctggcccagctgaagcctgaaaaggactctgatgaggctgtgacctacagcctgggcaagtttggacagagagccctggacttctacagcatccatgtgaccaaagaaagcacacaccctgtgaagcccctggctcagattgctggcaacagatatgcctctggacctgtgggcaaagccctgtctgatgcctgcatgggaaccattgccagctttctgagcaagtaccaggacatcatcattgagcaccagaaagtggtcaaggggaaccagaagaggctggaatctctgagagagctggctggcaaagagaacctggaatacccctctgtgaccctgcctcctcagcctcacaccaaagagggtgttgatgcctacaatgaagtgattgccagagtcaggatgtgggtcaacctgaatctgtggcagaagctgaagctgagcagggatgatgccaagcctctgctgagactgaagggcttccctagcttcccactggtggaaaggcaggctaatgaagtggattggtgggacatggtctgcaatgtgaagaaactgatcaatgagaagaaagaggatggcaaggttttctggcagaacctggctggctacaagaggcaagaagccctgaggccttacctgtcctctgaggaagataggaagaaggggaagaagtttgccagataccagctgggagatctgctgctgcacctggaaaagaaacatggggaagattggggcaaagtgtatgatgaggcctgggagagaattgacaagaaggtggaaggcctgagcaagcacattaagctggaagaggaaagaagatctgaggatgcccagagcaaggctgccctgactgattggctgagagccaaggccagctttgtgattgagggcctgaaagaggctgacaaggatgagttctgtagatgtgaactgaagctgcaaaagtggtatggggacctgaggggcaagccctttgccattgaggcagagaacagcatcctggacatcagtggcttcagcaagcagtacaactgtgccttcatttggcagaaggatggggttaagaagctcaacctgtacctgatcatcaactacttcaaaggtggcaagctgaggttcaagaagatcaagccagaggcctttgaggccaacaggttctacacagtgatcaacaaaaagtctggggagattgtgcccatggaagtgaacttcaactttgatgatcccaacctcatcatcctgccactggcctttggcaagagacagggcagagaattcatctggaatgacctgctgagcctggaaacaggcagcctgaaactggccaatggcagagtgattgagaaaaccctgtacaacagaaggaccagacaggatgagcctgcactgtttgtggccctgacctttgagagaagggaagtgctggatagcagcaacatcaagcccatgaacctgattggagtggacagaggggagaatatccctgctgtcattgccctgacagaccctgagggctgtcccctgagcagattcaaggactccctgggcaaccccacacacattctgagaattggggagagctacaaagagaagcagagaaccatccaggccaagaaagaagtggaacagaggagagctggaggctactctaggaagtatgccagcaaagccaagaatctggctgatgacatggtcagaaacacagccagggacctgctgtactatgctgtgacccaggatgccatgctgatctttgagaatctgagcagaggatttgggagacaaggcaagaggaccttcatggctgaaagacagtacaccaggatggaagattggctgactgccaaactggcctatgagggactgagcaagacctacctgtccaagacactggcccagtatacctccaagacctgcagcaattgtggcttcaccatcacctctgcagactatgacagagtgctggaaaagctcaagaaaacagccacaggctggatgaccaccatcaatgggaaagagctgaaggttgagggccagatcacctactacaacagatacaaaaggcagaatgtggttaaggacctgtctgtggaactggacagactgtctgaggaatctgtgaacaatgacatcagcagctggaccaagggcagatctggggaagctctgagcctgctgaagaagagattcagccacagacctgtgcaagagaagtttgtgtgtctgaactgtggctttgagacacatgctgatgaacaggctgctctgaacattgccagaagctggctgttcctgagaagccaagagtacaagaagtaccagaccaacaagaccacaggcaacactgacaagagggcctttgtggaaacctggcagagcttctacagaaagaaactcaaagaagtctggaagcctgctgtgggcagccctgcagctaaaagggtcaagctggactga

SEQ ID NO: 14089 - DNA, 208 bp, synthetic construct
  source 1..208: mol_type = other DNA
ctgtgccttctagttgccagccatctgttgtttgcccctccccagtgccttccttgaccctggaaggtgccactcccactgtcctttcctaataaaatgaggaaattgcatcacattgtctgagtaggtgtcattctattctggggggtggggtggggcaggacagcaagggggaggattgggaagagaatagcaggcatgctgggga

SEQ ID NO: 14090 - DNA, 241 bp, synthetic construct
  source 1..241: mol_type = other DNA
gagggcctatttcccatgattccttcatatttgcatatacaatacaaggctgttagagagataattggaattaatttgactgtaaacacaaagatattagtacaaaatatttgatgtagaaagtaataatttcttgggtagtttgcagttttaaaattatgttttaaaatggactatcatatgcttaccataacttgaaagtatttctatttcttggctttatatatcttgtggaaaggac

SEQ ID NO: 14091 - RNA, 3249 nt, synthetic construct
  source 1..3249: mol_type = other RNA
  modified_base order(3,5,6,8,11,22,42,49,52,63,69,73,87,96,97,100,105,106,117,120,127,128,130,145,163,165,174,177,180,186,189,201,213,222,235,241,243,255,279,283,288,291,299,309,321,324,330,332,334,335,344,345,360,366,369,378,382,388,402,406,417,429,447,461,462,463,467,469,476,489,491,492,493,495,497,504,513,532,533,541,542,545,546,554,561,579,582,588,597,604,613,619,627,632,634,635,639,647,648,663,667,668,669,670,671,673,674,678,679,682,684,695,708,715,717,718,726,727,740,746,756,768,779,781,783,792,800,801,804,806,808,812,822,823,825,828,843,846,867,876,885,903,908,910,913,918,924,928,931,937,940,954,958,962,972,975,984,990,992,996,1002,1006,1008,1010,1020,1026,1028,1030,1050,1053,1059,1067,1068,1076,1077,1081,1083,1086,1102,1107,1112,1115,1122,1125,1127,1129,1134,1143,1146,1150,1173,1175,1176,1178,1186,1188,1196,1204,1215,1223,1227,1262,1263,1271,1273,1278,1287,1290,1293,1299,1322,1332,1334,1339,1346,1356,1360,1368,1377,1389,1395,1412,1414,1440,1448,1452,1469,1470,1473,1476,1485,1508,1509,1511,1517,1524,1530,1538,1541,1549,1551,1564,1565,1566,1572,1590,1593,1599,1607,1608,1619,1625,1631,1632,1633,1635,1636,1637,1653,1662,1668,1670,1674,1677,1680,1685,1687,1688,1689,1704,1709,1710,1719,1726,1733,1734,1748,1749,1751,1758,1761,1762,1782,1785,1791,1797,1802,1803,1808,1809,1819,1824,1827,1830,1833,1839,1844,1845,1846,1868,1869,1872,1874,1884,1887,1889,1891,1893,1908,1914,1929,1932,1944,1946,1980,1982,1983,1984,1986,1992,1997,1998,2013,2016,2029,2031,2038,2040,2046,2049,2055,2073,2077,2082,2085,2091,2092,2108,2113,2115,2123,2124,2125,2136,2146,2154,2157,2163,2164,2171,2174,2196,2214,2230,2237,2240,2249,2271,2283,2286,2287,2293,2307,2310,2312,2315,2320,2322,2337,2340,2343,2345,2346,2355,2366,2367,2390,2391,2394,2408,2418,2426,2430,2442,2447,2457,2462,2464,2471,2475,2477,2486,2487,2495,2510,2513,2515,2519,2525,2526,2532,2546,2556,2559,2568,2588,2592,2601,2602,2616,2622,2634,2639,2642,2651,2667,2670,2679,2685,2691,2695,2700,2715,2722,2727,2735,2763,2769,2772,2783,2784,2786,2799,2810,2811,2814,2816,2818,2820,2825,2831,2832,2862,2868,2876,2878,2879,2883,2884,2885,2886,2889,2903,2912,2954,2955,2958,2966,2975,2976,2978,2991,3000,3002,3010,3015,3028,3039,3045,3050,3053,3057,3062,3069,3073,3079,3082,3083,3085,3086,3092,3093,3099,3112,3115,3120,3121,3124,3132,3140,3143,3145,3146,3147,3151,3156,3158,3162): mod_base = m1f
actcttctggtccccacagactcagagagaacccgccaccatggcccctgctgccaagagagtgaagctggatagcagacaggagatcaagcggattaataaaattcggagaagactggtgaaggattctaacacaaagaaggctggcaagacacggggccctatgaagacactgctggtgagagtgatgacacccgacctgagagaaagactggaaaacctgagaaagaagcctgagaatatcccccagcccatcagcaacacaagccgggccaacctgaataagctgctgaccgactacaccgaaatgaagaaggccatcctgcacgtgtattgggaagagttccagaaagacccagtcggcctgatgagcagagtggctcagcctgccagcaagaagatcgatcagaacaagctgaagcccgaaatggacgagaaggggaacctgacaaccgccggctttgcctgtagccagtgcggccagcccctgtttgtgtacaaactggaacaggtgagcgaaaagggcaaggcttacacgaattacttcggcagatgcaacgtggccgagcacgagaagctgatcaagctggcccagctgaagcctgagaaggatagcgatgaggcagtgacatattccctgggcaagttcggacagcgggccctggatttttattccattcatgtgaccaaggaatccacccaccccgtcaagcctcttgcccaaattgccggcaacagatacgcctccagccccgtgggcaaggccctgagcgacgcctgtatgggcaccatcgccagcttcctgtctaagtaccaggacattatcatcgagcaccagaaggtggtgaagggcaaccagaagagactggagagcctgcgcgagctggccggcaaggaaaacctggagtatcctagcgtgaccctgcctcctcagcctcatacaaaggagggcgtggatgcctacaacgaagtgatcgcccgggtgcggatgtgggtgaacctgaatctgtggcagaagctgaagctgtctagagacgacgccaagcccctgctgagactgaagggcttccccagcttccctctggtggagagacaggcaaatgaagtggactggtgggacatggtgtgtaacgtgaagaagctgatcaatgagaagaaggaggacggcaaagtgttctggcagaatctggccggctacaagcgtcaggaggccctgcggccctacctgagcagcgaggaagacagaaagaagggcaagaagttcgcccggtatcagctgggggacctgctgctgcacctcgagaagaagcacggcgaagactgggggaaggtgtacgatgaggcctgggagcggatcgataagaaggtggagggcctgagcaagcacatcaagctggaggaggaacggagatctgaggacgcccagagcaaggccgccctgaccgactggctgagagccaaggccagcttcgtcatcgaggggctgaaggaggccgacaaggacgagttctgccggtgcgaactgaagctgcagaagtggtacggagatctgagaggcaaacctttcgccatcgaggccgagaacagcatcctggacatcagcggcttcagcaagcagtacaactgcgcctttatttggcagaaggacggagtgaagaagctgaacctgtacctgatcatcaactatttcaagggcggcaagctgagattcaagaagatcaagcctgaagccttcgaggccaacagattctacaccgtgattaacaagaaaagcggagagatcgtgccaatggaagtgaacttcaacttcgacgaccctaacctgatcatcctgcccctggcatttggcaagcggcagggcagagagttcatctggaacgacctgctgtctctggagaccggcagcctgaagctggccaacggcagagtgatcgagaagacactgtacaacagacgaaccagacaagacgagcccgccctgtttgtggccctgaccttcgagagaagagaggtgctggacagcagcaatatcaagcctatgaacctgatcggcgtggaccggggcgagaacatccctgccgtgatcgcccttaccgaccccgagggatgccctctgagccggtttaaagacagcctgggcaaccctacccacatcctgagaattggcgagtcctacaaggagaagcagagaaccatccaggccaagaaggaggtggagcagcggcgggctggcggctactcccggaagtacgccagcaaggccaagaacctggccgacgacatggttagaaataccgccagagacctcctgtactacgctgtgacccaggacgccatgctgatcttcgagaacctgagcagaggcttcggcagacagggcaagagaaccttcatggccgagagacagtacacccggatggaggactggctgaccgccaagctggcctacgagggcctgccctctaagacctacctgtccaagaccttggcacagtacaccagcaagacatgctctaactgcggcttcacaatcacgagcgccgactacgaccgggtgctggagaaactgaagaagaccgccacaggctggatgaccaccattaacggcaaggagctgaaggtggagggccagatcacctactacaacaggtacaaacggcagaacgtggtgaaggacctgagcgtggaactggatagactgagcgaggaaagcgtaaacaatgacatcagcagctggaccaagggccggagcggcgaggccctgagcctgctgaagaagagattctcccacagaccagtgcaggagaagttcgtgtgtctgaactgcggcttcgagacccacgccgacgagcaagccgccctgaacatcgcccggtcttggcttttcctgcggagccaggagtacaagaagtaccagacaaacaagaccacaggcaacacagacaagagagccttcgtcgagacctggcagagcttctacagaaagaagctgaaggaggtgtggaagcctgccgtgggaagccccgctgccaagagagtgaagctggactaatagataagctggagcctcggtggccatgcttcttgccccttgggcctccccccagcccctcctccccttcctgcacccgtacccccgtggtctttgaataaagtctgagtgggcggcaaaaaaaaaaaaaaaaaaaaaaaaaaaaaaaaaaaaaaaaaaaaaaaaaaaaaaaaaaaaaaaaaaaaaaaaaaaaaaaa

SEQ ID NO: 14092 - RNA, 3241 nt, synthetic construct
  source 1..3241: mol_type = other RNA
  modified_base order(4,22,32,34,46,53,56,67,73,77,91,100,101,104,109,110,121,124,131,132,134,149,167,169,178,181,184,190,193,205,217,226,239,245,247,259,283,287,292,295,303,313,325,328,334,336,338,339,348,349,364,370,373,382,386,392,406,410,421,433,451,465,466,467,471,473,480,493,495,496,497,499,501,508,517,536,537,545,546,549,550,558,565,583,586,592,601,608,617,623,631,636,638,639,643,651,652,667,671,672,673,674,675,677,678,682,683,686,688,699,712,719,721,722,730,731,744,750,760,772,783,785,787,796,804,805,808,810,812,816,826,827,829,832,847,850,871,880,889,907,912,914,917,922,928,932,935,941,944,958,962,966,976,979,988,994,996,1000,1006,1010,1012,1014,1024,1030,1032,1034,1054,1057,1063,1071,1072,1080,1081,1085,1087,1090,1106,1111,1116,1119,1126,1129,1131,1133,1138,1147,1150,1154,1177,1179,1180,1182,1190,1192,1200,1208,1219,1227,1231,1266,1267,1275,1277,1282,1291,1294,1297,1303,1326,1336,1338,1343,1350,1360,1364,1372,1381,1393,1399,1416,1418,1444,1452,1456,1473,1474,1477,1480,1489,1512,1513,1515,1521,1528,1534,1542,1545,1553,1555,1568,1569,1570,1576,1594,1597,1603,1611,1612,1623,1629,1635,1636,1637,1639,1640,1641,1657,1666,1672,1674,1678,1681,1684,1689,1691,1692,1693,1708,1713,1714,1723,1730,1737,1738,1752,1753,1755,1762,1765,1766,1786,1789,1795,1801,1806,1807,1812,1813,1823,1828,1831,1834,1837,1843,1848,1849,1850,1872,1873,1876,1878,1888,1891,1893,1895,1897,1912,1918,1933,1936,1948,1950,1984,1986,1987,1988,1990,1996,2001,2002,2017,2020,2033,2035,2042,2044,2050,2053,2059,2077,2081,2086,2089,2095,2096,2112,2117,2119,2127,2128,2129,2140,2150,2158,2161,2167,2168,2175,2178,2200,2218,2234,2241,2244,2253,2275,2287,2290,2291,2297,2311,2314,2316,2319,2324,2326,2341,2344,2347,2349,2350,2359,2370,2371,2394,2395,2398,2412,2422,2430,2434,2446,2451,2461,2466,2468,2475,2479,2481,2490,2491,2499,2514,2517,2519,2523,2529,2530,2536,2550,2560,2563,2572,2592,2596,2605,2606,2620,2626,2638,2643,2646,2655,2671,2674,2683,2689,2695,2699,2704,2719,2726,2731,2739,2767,2773,2776,2787,2788,2790,2803,2814,2815,2818,2820,2822,2824,2829,2835,2836,2866,2872,2880,2882,2883,2887,2888,2889,2890,2893,2907,2916,2958,2959,2962,2970,2979,2980,2982,2995,3004,3006,3014,3019,3032,3043,3049,3054,3057,3061,3066,3070,3071,3073,3081,3082,3086,3087,3089,3095,3100,3101,3103,3104,3106,3108,3112,3113,3119,3121,3125,3127,3128,3131,3133,3134,3135,3139,3146,3150,3157,3159): mod_base = m1f
aaataagagagaaaagaagagtaagaagaaatataagagccaccatggcccctgctgccaagagagtgaagctggatagcagacaggagatcaagcggattaataaaattcggagaagactggtgaaggattctaacacaaagaaggctggcaagacacggggccctatgaagacactgctggtgagagtgatgacacccgacctgagagaaagactggaaaacctgagaaagaagcctgagaatatcccccagcccatcagcaacacaagccgggccaacctgaataagctgctgaccgactacaccgaaatgaagaaggccatcctgcacgtgtattgggaagagttccagaaagacccagtcggcctgatgagcagagtggctcagcctgccagcaagaagatcgatcagaacaagctgaagcccgaaatggacgagaaggggaacctgacaaccgccggctttgcctgtagccagtgcggccagcccctgtttgtgtacaaactggaacaggtgagcgaaaagggcaaggcttacacgaattacttcggcagatgcaacgtggccgagcacgagaagctgatcaagctggcccagctgaagcctgagaaggatagcgatgaggcagtgacatattccctgggcaagttcggacagcgggccctggatttttattccattcatgtgaccaaggaatccacccaccccgtcaagcctcttgcccaaattgccggcaacagatacgcctccagccccgtgggcaaggccctgagcgacgcctgtatgggcaccatcgccagcttcctgtctaagtaccaggacattatcatcgagcaccagaaggtggtgaagggcaaccagaagagactggagagcctgcgcgagctggccggcaaggaaaacctggagtatcctagcgtgaccctgcctcctcagcctcatacaaaggagggcgtggatgcctacaacgaagtgatcgcccgggtgcggatgtgggtgaacctgaatctgtggcagaagctgaagctgtctagagacgacgccaagcccctgctgagactgaagggcttccccagcttccctctggtggagagacaggcaaatgaagtggactggtgggacatggtgtgtaacgtgaagaagctgatcaatgagaagaaggaggacggcaaagtgttctggcagaatctggccggctacaagcgtcaggaggccctgcggccctacctgagcagcgaggaagacagaaagaagggcaagaagttcgcccggtatcagctgggggacctgctgctgcacctcgagaagaagcacggcgaagactgggggaaggtgtacgatgaggcctgggagcggatcgataagaaggtggagggcctgagcaagcacatcaagctggaggaggaacggagatctgaggacgcccagagcaaggccgccctgaccgactggctgagagccaaggccagcttcgtcatcgaggggctgaaggaggccgacaaggacgagttctgccggtgcgaactgaagctgcagaagtggtacggagatctgagaggcaaacctttcgccatcgaggccgagaacagcatcctggacatcagcggcttcagcaagcagtacaactgcgcctttatttggcagaaggacggagtgaagaagctgaacctgtacctgatcatcaactatttcaagggcggcaagctgagattcaagaagatcaagcctgaagccttcgaggccaacagattctacaccgtgattaacaagaaaagcggagagatcgtgccaatggaagtgaacttcaacttcgacgaccctaacctgatcatcctgcccctggcatttggcaagcggcagggcagagagttcatctggaacgacctgctgtctctggagaccggcagcctgaagctggccaacggcagagtgatcgagaagacactgtacaacagacgaaccagacaagacgagcccgccctgtttgtggccctgaccttcgagagaagagaggtgctggacagcagcaatatcaagcctatgaacctgatcggcgtggaccggggcgagaacatccctgccgtgatcgcccttaccgaccccgagggatgccctctgagccggtttaaagacagcctgggcaaccctacccacatcctgagaattggcgagtcctacaaggagaagcagagaaccatccaggccaagaaggaggtggagcagcggcgggctggcggctactcccggaagtacgccagcaaggccaagaacctggccgacgacatggttagaaataccgccagagacctcctgtactacgctgtgacccaggacgccatgctgatcttcgagaacctgagcagaggcttcggcagacagggcaagagaaccttcatggccgagagacagtacacccggatggaggactggctgaccgccaagctggcctacgagggcctgccctctaagacctacctgtccaagaccttggcacagtacaccagcaagacatgctctaactgcggcttcacaatcacgagcgccgactacgaccgggtgctggagaaactgaagaagaccgccacaggctggatgaccaccattaacggcaaggagctgaaggtggagggccagatcacctactacaacaggtacaaacggcagaacgtggtgaaggacctgagcgtggaactggatagactgagcgaggaaagcgtaaacaatgacatcagcagctggaccaagggccggagcggcgaggccctgagcctgctgaagaagagattctcccacagaccagtgcaggagaagttcgtgtgtctgaactgcggcttcgagacccacgccgacgagcaagccgccctgaacatcgcccggtcttggcttttcctgcggagccaggagtacaagaagtaccagacaaacaagaccacaggcaacacagacaagagagccttcgtcgagacctggcagagcttctacagaaagaagctgaaggaggtgtggaagcctgccgtgggaagccccgctgccaagagagtgaagctggactaatagataagctgccttctgcggggcttgccttctggccatgcccttcttctctcccttgcacctgtacctcttggtctttgaataaagcctgagtaggaagtctagaaaaaaaaaaaaaaaaaaaaaaaaaaaaaaaaaaaaaaaaaaaaaaaaaaaaaaaaaaaaaaaaaaaaaaaaaaaaaaaa

SEQ ID NO: 14093 - RNA, 20 nt, synthetic construct
  source 1..20: mol_type = other RNA
ccaagaagccagggaagagg

SEQ ID NO: 14094 - RNA, 20 nt, synthetic construct
  source 1..20: mol_type = other RNA
acatatcttttatgacctct

SEQ ID NO: 14095 - RNA, 20 nt, synthetic construct
  source 1..20: mol_type = other RNA
ctggcttcttggtgaagatg

SEQ ID NO: 14096 - RNA, 20 nt, synthetic construct
  source 1..20: mol_type = other RNA
tggtgaagatgagcagtgac

SEQ ID NO: 14097 - RNA, 20 nt, synthetic construct
  source 1..20: mol_type = other RNA
gccgttgctccaaggtatgg

SEQ ID NO: 14098 - RNA, 20 nt, synthetic construct
  source 1..20: mol_type = other RNA
ttcttggggatcaggaggcc

SEQ ID NO: 14099 - DNA, 2934 bp, synthetic construct
  source 1..2934: mol_type = other DNA
caggagatcaagcggattaataaaattcggagaagactggtgaaggattctaacacaaagaaggctggcaagacaggccctatgaagacactgctggtgagagtgatgacacccgacctgagagaaagactggaaaacctgagaaagaagcctgagaatatcccccagcccatcagcaacacaagccgggccaacctgaataagctgctgaccgactacaccgaaatgaagaaggccatcctgcacgtgtattgggaagagttccagaaagacccagtcggcctgatgagcagagtggctcagcctgccagcaagaagatcgatcagaacaagctgaagcccgaaatggacgagaaggggaacctgacaaccgccggctttgcctgtagccagtgcggccagcccctgtttgtgtacaaactggaacaggtgagcgaaaagggcaaggcttacacgaattacttcggcagatgcaacgtggccgagcacgagaagctgatcctgctggcccagctgaagcctgagaaggatagcgatgaggcagtgacatattccctgggcaagttcggacagcgggccctggatttttattccattcatgtgaccaaggaatccacccaccccgtcaagcctcttgcccaaattgccggcaacagatacgccagcggccccgtgggcaaggccctgagcgacgcctgtatgggcaccatcgccagcttcctgtctaagtaccaggacattatcatcgagcaccagaaggtggtgaagggcaaccagaagagactggagagcctgcgcgagctggccggcaaggaaaacctggagtatcctagcgtgaccctgcctcctcagcctcatacaaaggagggcgtggatgcctacaacgaagtgatcgcccgggtgcggatgtgggtgaacctgaatctgtggcagaagctgaagctgtctagagacgacgccaagcccctgctgagactgaagggcttccccagcttccctctggtggagagacaggcaaatgaagtggactggtgggacatggtgtgtaacgtgaagaagctgatcaatgagaagaaggaggacggcaaagtgttctggcagaatctggccggctacaagcgtcaggaggccctgcggccctacctgagcagcgaggaagacagaaagaagggcaagaagttcgcccggtatcagctgggggacctgctgctgcacctcgagaagaagcacggcgaagactgggggaaggtgtacgatgaggcctgggagcggatcgataagaaggtggagggcctgagcaagcacatcaagctggaggaggaacggagatctgaggacgcccagagcaaggccgccctgaccgactggctgagagccaaggccagcttcgtcatcgaggggctgaaggaggccgacaaggacgagttctgccggtgcgaactgaagctgcagaagtggtacggagatctgagaggcaaacctttcgccatcgaggccgagaacagcatcctggacatcagcggcttcagcaagcagtacaactgcgcctttatttggcagaaggacggagtgaagaagctgaacctgtacctgatcatcaactatttcaagggcggcaagctgagattcaagaagatcaagcctgaagccttcgaggccaacagattctacaccgtgattaacaagaaaagcggagagatcgtgccaatggaagtgaacttcaacttcgacgaccctaacctgatcatcctgcccctggcatttggcaagcggcagggcagagagttcatctggaacgacctgctgtctctggagaccggcagcctgaagctggccaacggcagagtgatcgagaagacactgtacaacagacgaaccagacaagacgagcccgccctgtttgtggccctgaccttcgagagaagagaggtgctggacagcagcaatatcaagcctatgaacctgatcggcgtggaccggggcgagaacatccctgccgtgatcgcccttaccgaccccgagggatgccctctgagccggtttaaagacagcctgggcaaccctacccacatcctgagaattggcgagtcctacaaggagaagcagagaaccatccaggccaagaaggaggtggagcagcggcgggctggcggctactcccggaagtacgccagcaaggccaagaacctggccgacgacatggttagaaataccgccagagacctcctgtactacgctgtgacccaggacgccatgctgatcttcgagaacctgagcagaggcttcggcagacagggcaagagaaccttcatggccgagagacagtacacccggatggaggactggctgaccgccaagctggcctacgagggcctgccctctaagacctacctgtccaagaccttggcacagtacaccagcaagacatgctctaactgcggcttcacaatcacgagcgccgactacgaccgggtgctggagaaactgaagaagaccgccacaggctggatgaccaccattaacggcaaggagctgaaggtggagggccagatcacctactacaacaggtacaaacggcagaacgtggtgaaggacctgagcgtggaactggatagactgagcgaggaaagcgtaaacaatgacatcagcagctggaccaagggccggagcggcgaggccctgagcctgctgaagaagagattctcccacagaccagtgcaggagaagttcgtgtgtctgaactgcggcttcgagacccacgccgacgagcaagccgccctgaacatcgcccggtcttggcttttcctgcggagccaggagtacaagaagtaccagacaaacaagaccacaggcaacacagacaagagagccttcgtcgagacctggcagagcttctacagaaagaagctgaaggaggtgtggaagcctgccgtg

SEQ ID NO: 14100 - DNA, 2934 bp, synthetic construct
  source 1..2934: mol_type = other DNA
caggagatcaagcggattaataaaattcggagaagactggtgaaggattctaacacaaagaaggctggcaagacaggccctatgaagacactgctggtgagagtgatgacacccgacctgagagaaagactggaaaacctgagaaagaagcctgagaatatcccccagcccatcagcaacacaagccgggccaacctgaataagctgctgaccgactacaccgaaatgaagaaggccatcctgcacgtgtattgggaagagttccagaaagacccagtcggcctgatgagcagagtggctcagcctgccagcaagaagatcgatcagaacaagctgaagcccgaaatggacgagaaggggaacctgacaaccgccggctttgcctgtagccagtgcggccagcccctgtttgtgtacaaactggaacaggtgagcgaaaagggcaaggcttacacgaattacttcggcagatgcaacgtggccgagcacgagaagctgatcctgctggcccagctgaagcctgagaaggatagcgatgaggcagtgacatattccctgggcaagttcggacagcgggccctggatttttattccattcatgtgaccaaggaatccacccaccccgtcaagcctcttgcccaaattgccggcaacagatacgccagcggccccgtgggcaaggccctgagcgacgcctgtatgggcaccatcgccagcttcctgtctaagtaccaggacattatcatcgagcaccagaaggtggtgaagggcaaccagaagagactggagagcctgcgcgagctggccggcaaggaaaacctggagtatcctagcgtgaccctgcctcctcagcctcatacaaaggagggcgtggatgcctacaacgaagtgatcgcccgggtgcggatgtgggtgaacctgaatctgtggcagaagctgaagctgtctagagacgacgccaagcccctgctgagactgaagaagttccccagcttccctctggtggagagacaggcaaatgaagtggactggtgggacatggtgtgtaacgtgaagaagctgatcaatgagaagaaggaggacggcaaagtgttctggcagaatctggccggctacaagcgtcaggaggccctgcggccctacctgagcagcgaggaagacagaaagaagggcaagaagttcgcccggtatcagctgggggacctgctgctgcacctcgagaagaagcacggcgaagactgggggaaggtgtacgatgaggcctgggagcggatcgataagaaggtggagggcctgagcaagcacatcaagctggaggaggaacggagatctgaggacgcccagagcaaggccgccctgaccgactggctgagagccaaggccagcttcgtcatcgaggggctgaaggaggccgacaaggacgagttctgccggtgcgaactgaagctgcagaagtggtacggagatctgagaggcaaacctttcgccatcgaggccgagaacagcatcctggacatcagcggcttcagcaagcagtacaactgcgcctttatttggcagaaggacggagtgaagaagctgaacctgtacctgatcatcaactatttcaagggcggcaagctgagattcaagaagatcaagcctgaagccttcgaggccaacagattctacaccgtgattaacaagaaaagcggagagatcgtgccaatggaagtgaacttcaacttcgacgaccctaacctgatcatcctgcccctggcatttggcaagcggcagggcagagagttcatctggaacgacctgctgtctctggagaccggcagcctgaagctggccaacggcagagtgatcgagaagacactgtacaacagacgaaccagacaagacgagcccgccctgtttgtggccctgaccttcgagagaagagaggtgctggacagcagcaatatcaagcctatgaacctgatcggcgtggaccggggcgagaacatccctgccgtgatcgcccttaccgaccccgagggatgccctctgagccggtttaaagacagcctgggcaaccctacccacatcctgagaattggcgagtcctacaaggagaagcagagaaccatccaggccaagaaggaggtggagcagcggcgggctggcggctactcccggaagtacgccagcaaggccaagaacctggccgacgacatggttagaaataccgccagagacctcctgtactacgctgtgacccaggacgccatgctgatcttcgagaacctgagcagaggcttcggcagacagggcaagagaaccttcatggccgagagacagtacacccggatggaggactggctgaccgccaagctggcctacgagggcctgccctctaagacctacctgtccaagaccttggcacagtacaccagcaagacatgctctaactgcggcttcacaatcacgagcgccgactacgaccgggtgctggagaaactgaagaagaccgccacaggctggatgaccaccattaacggcaaggagctgaaggtggagggccagatcacctactacaacaggtacaaacggcagaacgtggtgaaggacctgagcgtggaactggatagactgagcgaggaaagcgtaaacaatgacatcagcagctggaccaagggccggagcggcgaggccctgagcctgctgaagaagagattctcccacagaccagtgcaggagaagttcgtgtgtctgaactgcggcttcgagacccacgccgacgagcaagccgccctgaacatcgcccggtcttggcttttcctgcggagccaggagtacaagaagtaccagacaaacaagaccacaggcaacacagacaagagagccttcgtcgagacctggcagagcttctacagaaagaagctgaaggaggtgtggaagcctgccgtg

SEQ ID NO: 14101 - DNA, 36 bp, synthetic construct
  source 1..36: mol_type = other DNA
ggaagccccgctgccaagagagtgaagctggactaa

SEQ ID NO: 14102 - DNA, 79 bp, synthetic construct
  source 1..79: mol_type = other DNA
aaaaaaaaaaaaaaaaaaaaaaaaaaaaaaaaaaaaaaaaaaaaaaaaaaaaaaaaaaaaaaaaaaaaaaaaaaaaaaa

SEQ ID NO: 14103 - RNA, 3230 nt, synthetic construct
  source 1..3230: mol_type = other RNA
  modified_base order(4,22,32,34,46,53,56,67,73,77,91,100,101,104,109,110,121,124,131,132,134,149,164,166,175,178,181,187,190,202,214,223,236,242,244,256,280,284,289,292,300,310,322,325,331,333,335,336,345,346,361,367,370,379,383,389,403,407,418,430,448,462,463,464,468,470,477,490,492,493,494,496,498,505,514,533,534,542,543,546,547,555,562,580,583,586,589,598,605,614,620,628,633,635,636,640,648,649,664,668,669,670,671,672,674,675,679,680,683,685,696,709,716,718,719,727,728,741,757,769,780,782,784,793,801,802,805,807,809,813,823,824,826,829,844,847,868,877,886,904,909,911,914,919,925,929,932,938,941,955,959,963,973,976,985,991,993,997,1003,1007,1009,1011,1021,1027,1029,1031,1051,1054,1060,1068,1069,1077,1078,1082,1084,1087,1103,1108,1113,1116,1123,1126,1128,1130,1135,1144,1147,1151,1174,1176,1177,1179,1187,1189,1197,1205,1216,1224,1228,1263,1264,1272,1274,1279,1288,1291,1294,1300,1323,1333,1335,1340,1347,1357,1361,1369,1378,1390,1396,1413,1415,1441,1449,1453,1470,1471,1474,1477,1486,1509,1510,1512,1518,1525,1531,1539,1542,1550,1552,1565,1566,1567,1573,1591,1594,1600,1608,1609,1620,1626,1632,1633,1634,1636,1637,1638,1654,1663,1669,1671,1675,1678,1681,1686,1688,1689,1690,1705,1710,1711,1720,1727,1734,1735,1749,1750,1752,1759,1762,1763,1783,1786,1792,1798,1803,1804,1809,1810,1820,1825,1828,1831,1834,1840,1845,1846,1847,1869,1870,1873,1875,1885,1888,1890,1892,1894,1909,1915,1930,1933,1945,1947,1981,1983,1984,1985,1987,1993,1998,1999,2014,2017,2030,2032,2039,2041,2047,2050,2056,2074,2078,2083,2086,2092,2093,2109,2114,2116,2124,2125,2126,2137,2147,2155,2158,2164,2165,2172,2175,2197,2215,2231,2238,2241,2250,2272,2284,2287,2288,2294,2308,2311,2313,2316,2321,2323,2338,2341,2344,2346,2347,2356,2367,2368,2391,2392,2395,2409,2419,2427,2431,2443,2448,2458,2463,2465,2472,2476,2478,2487,2488,2496,2511,2514,2516,2520,2526,2527,2533,2547,2557,2560,2569,2589,2593,2602,2603,2617,2623,2635,2640,2643,2652,2668,2671,2680,2686,2692,2696,2701,2716,2723,2728,2736,2764,2770,2773,2784,2785,2787,2800,2811,2812,2815,2817,2819,2821,2826,2832,2833,2863,2869,2877,2879,2880,2884,2885,2886,2887,2890,2904,2913,2955,2956,2959,2967,2976,2977,2979,2992,3001,3003,3011,3016,3029,3040,3046,3051,3056,3060,3061,3063,3071,3072,3076,3077,3079,3085,3090,3091,3093,3094,3096,3098,3102,3103,3109,3111,3115,3117,3118,3121,3123,3124,3125,3129,3136,3140,3147,3149): mod_base = m1f
aaataagagagaaaagaagagtaagaagaaatataagagccaccatggcccctgctgccaagagagtgaagctggatagcagacaggagatcaagcggattaataaaattcggagaagactggtgaaggattctaacacaaagaaggctggcaagacaggccctatgaagacactgctggtgagagtgatgacacccgacctgagagaaagactggaaaacctgagaaagaagcctgagaatatcccccagcccatcagcaacacaagccgggccaacctgaataagctgctgaccgactacaccgaaatgaagaaggccatcctgcacgtgtattgggaagagttccagaaagacccagtcggcctgatgagcagagtggctcagcctgccagcaagaagatcgatcagaacaagctgaagcccgaaatggacgagaaggggaacctgacaaccgccggctttgcctgtagccagtgcggccagcccctgtttgtgtacaaactggaacaggtgagcgaaaagggcaaggcttacacgaattacttcggcagatgcaacgtggccgagcacgagaagctgatcctgctggcccagctgaagcctgagaaggatagcgatgaggcagtgacatattccctgggcaagttcggacagcgggccctggatttttattccattcatgtgaccaaggaatccacccaccccgtcaagcctcttgcccaaattgccggcaacagatacgccagcggccccgtgggcaaggccctgagcgacgcctgtatgggcaccatcgccagcttcctgtctaagtaccaggacattatcatcgagcaccagaaggtggtgaagggcaaccagaagagactggagagcctgcgcgagctggccggcaaggaaaacctggagtatcctagcgtgaccctgcctcctcagcctcatacaaaggagggcgtggatgcctacaacgaagtgatcgcccgggtgcggatgtgggtgaacctgaatctgtggcagaagctgaagctgtctagagacgacgccaagcccctgctgagactgaagggcttccccagcttccctctggtggagagacaggcaaatgaagtggactggtgggacatggtgtgtaacgtgaagaagctgatcaatgagaagaaggaggacggcaaagtgttctggcagaatctggccggctacaagcgtcaggaggccctgcggccctacctgagcagcgaggaagacagaaagaagggcaagaagttcgcccggtatcagctgggggacctgctgctgcacctcgagaagaagcacggcgaagactgggggaaggtgtacgatgaggcctgggagcggatcgataagaaggtggagggcctgagcaagcacatcaagctggaggaggaacggagatctgaggacgcccagagcaaggccgccctgaccgactggctgagagccaaggccagcttcgtcatcgaggggctgaaggaggccgacaaggacgagttctgccggtgcgaactgaagctgcagaagtggtacggagatctgagaggcaaacctttcgccatcgaggccgagaacagcatcctggacatcagcggcttcagcaagcagtacaactgcgcctttatttggcagaaggacggagtgaagaagctgaacctgtacctgatcatcaactatttcaagggcggcaagctgagattcaagaagatcaagcctgaagccttcgaggccaacagattctacaccgtgattaacaagaaaagcggagagatcgtgccaatggaagtgaacttcaacttcgacgaccctaacctgatcatcctgcccctggcatttggcaagcggcagggcagagagttcatctggaacgacctgctgtctctggagaccggcagcctgaagctggccaacggcagagtgatcgagaagacactgtacaacagacgaaccagacaagacgagcccgccctgtttgtggccctgaccttcgagagaagagaggtgctggacagcagcaatatcaagcctatgaacctgatcggcgtggaccggggcgagaacatccctgccgtgatcgcccttaccgaccccgagggatgccctctgagccggtttaaagacagcctgggcaaccctacccacatcctgagaattggcgagtcctacaaggagaagcagagaaccatccaggccaagaaggaggtggagcagcggcgggctggcggctactcccggaagtacgccagcaaggccaagaacctggccgacgacatggttagaaataccgccagagacctcctgtactacgctgtgacccaggacgccatgctgatcttcgagaacctgagcagaggcttcggcagacagggcaagagaaccttcatggccgagagacagtacacccggatggaggactggctgaccgccaagctggcctacgagggcctgccctctaagacctacctgtccaagaccttggcacagtacaccagcaagacatgctctaactgcggcttcacaatcacgagcgccgactacgaccgggtgctggagaaactgaagaagaccgccacaggctggatgaccaccattaacggcaaggagctgaaggtggagggccagatcacctactacaacaggtacaaacggcagaacgtggtgaaggacctgagcgtggaactggatagactgagcgaggaaagcgtaaacaatgacatcagcagctggaccaagggccggagcggcgaggccctgagcctgctgaagaagagattctcccacagaccagtgcaggagaagttcgtgtgtctgaactgcggcttcgagacccacgccgacgagcaagccgccctgaacatcgcccggtcttggcttttcctgcggagccaggagtacaagaagtaccagacaaacaagaccacaggcaacacagacaagagagccttcgtcgagacctggcagagcttctacagaaagaagctgaaggaggtgtggaagcctgccgtgggaagccccgctgccaagagagtgaagctggactaagctgccttctgcggggcttgccttctggccatgcccttcttctctcccttgcacctgtacctcttggtctttgaataaagcctgagtaggaagtctagaaaaaaaaaaaaaaaaaaaaaaaaaaaaaaaaaaaaaaaaaaaaaaaaaaaaaaaaaaaaaaaaaaaaaaaaaaaaaaa

SEQ ID NO: 14104 - RNA, 3230 nt, synthetic construct
  source 1..3230: mol_type = other RNA
  modified_base order(4,22,32,34,46,53,56,67,73,77,91,100,101,104,109,110,121,124,131,132,134,149,164,166,175,178,181,187,190,202,214,223,236,242,244,256,280,284,289,292,300,310,322,325,331,333,335,336,345,346,361,367,370,379,383,389,403,407,418,430,448,462,463,464,468,470,477,490,492,493,494,496,498,505,514,533,534,542,543,546,547,555,562,580,583,586,589,598,605,614,620,628,633,635,636,640,648,649,664,668,669,670,671,672,674,675,679,680,683,685,696,709,716,718,719,727,728,741,757,769,780,782,784,793,801,802,805,807,809,813,823,824,826,829,844,847,868,877,886,904,909,911,914,919,925,929,932,938,941,955,959,963,973,976,985,991,993,997,1003,1007,1009,1011,1021,1027,1029,1031,1051,1054,1060,1068,1069,1077,1078,1082,1084,1087,1103,1108,1113,1116,1123,1126,1128,1130,1135,1144,1147,1151,1174,1176,1177,1179,1187,1189,1197,1205,1216,1224,1228,1263,1264,1272,1274,1279,1288,1291,1294,1300,1323,1333,1335,1340,1347,1357,1361,1369,1378,1390,1396,1413,1415,1441,1449,1453,1470,1471,1474,1477,1486,1509,1510,1512,1518,1525,1531,1539,1542,1550,1552,1565,1566,1567,1573,1591,1594,1600,1608,1609,1620,1626,1632,1633,1634,1636,1637,1638,1654,1663,1669,1671,1675,1678,1681,1686,1688,1689,1690,1705,1710,1711,1720,1727,1734,1735,1749,1750,1752,1759,1762,1763,1783,1786,1792,1798,1803,1804,1809,1810,1820,1825,1828,1831,1834,1840,1845,1846,1847,1869,1870,1873,1875,1885,1888,1890,1892,1894,1909,1915,1930,1933,1945,1947,1981,1983,1984,1985,1987,1993,1998,1999,2014,2017,2030,2032,2039,2041,2047,2050,2056,2074,2078,2083,2086,2092,2093,2109,2114,2116,2124,2125,2126,2137,2147,2155,2158,2164,2165,2172,2175,2197,2215,2231,2238,2241,2250,2272,2284,2287,2288,2294,2308,2311,2313,2316,2321,2323,2338,2341,2344,2346,2347,2356,2367,2368,2391,2392,2395,2409,2419,2427,2431,2443,2448,2458,2463,2465,2472,2476,2478,2487,2488,2496,2511,2514,2516,2520,2526,2527,2533,2547,2557,2560,2569,2589,2593,2602,2603,2617,2623,2635,2640,2643,2652,2668,2671,2680,2686,2692,2696,2701,2716,2723,2728,2736,2764,2770,2773,2784,2785,2787,2800,2811,2812,2815,2817,2819,2821,2826,2832,2833,2863,2869,2877,2879,2880,2884,2885,2886,2887,2890,2904,2913,2955,2956,2959,2967,2976,2977,2979,2992,3001,3003,3011,3016,3029,3040,3046,3051,3056,3060,3061,3063,3071,3072,3076,3077,3079,3085,3090,3091,3093,3094,3096,3098,3102,3103,3109,3111,3115,3117,3118,3121,3123,3124,3125,3129,3136,3140,3147,3149): mod_base = m1f
aaataagagagaaaagaagagtaagaagaaatataagagccaccatggcccctgctgccaagagagtgaagctggatagcagacaggagatcaagcggattaataaaattcggagaagactggtgaaggattctaacacaaagaaggctggcaagacaggccctatgaagacactgctggtgagagtgatgacacccgacctgagagaaagactggaaaacctgagaaagaagcctgagaatatcccccagcccatcagcaacacaagccgggccaacctgaataagctgctgaccgactacaccgaaatgaagaaggccatcctgcacgtgtattgggaagagttccagaaagacccagtcggcctgatgagcagagtggctcagcctgccagcaagaagatcgatcagaacaagctgaagcccgaaatggacgagaaggggaacctgacaaccgccggctttgcctgtagccagtgcggccagcccctgtttgtgtacaaactggaacaggtgagcgaaaagggcaaggcttacacgaattacttcggcagatgcaacgtggccgagcacgagaagctgatcctgctggcccagctgaagcctgagaaggatagcgatgaggcagtgacatattccctgggcaagttcggacagcgggccctggatttttattccattcatgtgaccaaggaatccacccaccccgtcaagcctcttgcccaaattgccggcaacagatacgccagcggccccgtgggcaaggccctgagcgacgcctgtatgggcaccatcgccagcttcctgtctaagtaccaggacattatcatcgagcaccagaaggtggtgaagggcaaccagaagagactggagagcctgcgcgagctggccggcaaggaaaacctggagtatcctagcgtgaccctgcctcctcagcctcatacaaaggagggcgtggatgcctacaacgaagtgatcgcccgggtgcggatgtgggtgaacctgaatctgtggcagaagctgaagctgtctagagacgacgccaagcccctgctgagactgaagaagttccccagcttccctctggtggagagacaggcaaatgaagtggactggtgggacatggtgtgtaacgtgaagaagctgatcaatgagaagaaggaggacggcaaagtgttctggcagaatctggccggctacaagcgtcaggaggccctgcggccctacctgagcagcgaggaagacagaaagaagggcaagaagttcgcccggtatcagctgggggacctgctgctgcacctcgagaagaagcacggcgaagactgggggaaggtgtacgatgaggcctgggagcggatcgataagaaggtggagggcctgagcaagcacatcaagctggaggaggaacggagatctgaggacgcccagagcaaggccgccctgaccgactggctgagagccaaggccagcttcgtcatcgaggggctgaaggaggccgacaaggacgagttctgccggtgcgaactgaagctgcagaagtggtacggagatctgagaggcaaacctttcgccatcgaggccgagaacagcatcctggacatcagcggcttcagcaagcagtacaactgcgcctttatttggcagaaggacggagtgaagaagctgaacctgtacctgatcatcaactatttcaagggcggcaagctgagattcaagaagatcaagcctgaagccttcgaggccaacagattctacaccgtgattaacaagaaaagcggagagatcgtgccaatggaagtgaacttcaacttcgacgaccctaacctgatcatcctgcccctggcatttggcaagcggcagggcagagagttcatctggaacgacctgctgtctctggagaccggcagcctgaagctggccaacggcagagtgatcgagaagacactgtacaacagacgaaccagacaagacgagcccgccctgtttgtggccctgaccttcgagagaagagaggtgctggacagcagcaatatcaagcctatgaacctgatcggcgtggaccggggcgagaacatccctgccgtgatcgcccttaccgaccccgagggatgccctctgagccggtttaaagacagcctgggcaaccctacccacatcctgagaattggcgagtcctacaaggagaagcagagaaccatccaggccaagaaggaggtggagcagcggcgggctggcggctactcccggaagtacgccagcaaggccaagaacctggccgacgacatggttagaaataccgccagagacctcctgtactacgctgtgacccaggacgccatgctgatcttcgagaacctgagcagaggcttcggcagacagggcaagagaaccttcatggccgagagacagtacacccggatggaggactggctgaccgccaagctggcctacgagggcctgccctctaagacctacctgtccaagaccttggcacagtacaccagcaagacatgctctaactgcggcttcacaatcacgagcgccgactacgaccgggtgctggagaaactgaagaagaccgccacaggctggatgaccaccattaacggcaaggagctgaaggtggagggccagatcacctactacaacaggtacaaacggcagaacgtggtgaaggacctgagcgtggaactggatagactgagcgaggaaagcgtaaacaatgacatcagcagctggaccaagggccggagcggcgaggccctgagcctgctgaagaagagattctcccacagaccagtgcaggagaagttcgtgtgtctgaactgcggcttcgagacccacgccgacgagcaagccgccctgaacatcgcccggtcttggcttttcctgcggagccaggagtacaagaagtaccagacaaacaagaccacaggcaacacagacaagagagccttcgtcgagacctggcagagcttctacagaaagaagctgaaggaggtgtggaagcctgccgtgggaagccccgctgccaagagagtgaagctggactaagctgccttctgcggggcttgccttctggccatgcccttcttctctcccttgcacctgtacctcttggtctttgaataaagcctgagtaggaagtctagaaaaaaaaaaaaaaaaaaaaaaaaaaaaaaaaaaaaaaaaaaaaaaaaaaaaaaaaaaaaaaaaaaaaaaaaaaaaaaa

SEQ ID NO: 14105 - protein, 1002 aa, synthetic construct
MAPAAKRVKLDSRQEIKRINKIRRRLVKDSNTKKAGKTGPMKTLLVRVMTPDLRERLENLRKKPENIPQPISNTSRANLNKLLTDYTEMKKAILHVYWEEFQKDPVGLMSRVAQPASKKIDQNKLKPEMDEKGNLTTAGFACSQCGQPLFVYKLEQVSEKGKAYTNYFGRCNVAEHEKLILLAQLKPEKDSDEAVTYSLGKFGQRALDFYSIHVTKESTHPVKPLAQIAGNRYASGPVGKALSDACMGTIASFLSKYQDIIIEHQKVVKGNQKRLESLRELAGKENLEYPSVTLPPQPHTKEGVDAYNEVIARVRMWVNLNLWQKLKLSRDDAKPLLRLKGFPSFPLVERQANEVDWWDMVCNVKKLINEKKEDGKVFWQNLAGYKRQEALRPYLSSEEDRKKGKKFARYQLGDLLLHLEKKHGEDWGKVYDEAWERIDKKVEGLSKHIKLEEERRSEDAQSKAALTDWLRAKASFVIEGLKEADKDEFCRCELKLQKWYGDLRGKPFAIEAENSILDISGFSKQYNCAFIWQKDGVKKLNLYLIINYFKGGKLRFKKIKPEAFEANRFYTVINKKSGEIVPMEVNFNFDDPNLIILPLAFGKRQGREFIWNDLLSLETGSLKLANGRVIEKTLYNRRTRQDEPALFVALTFERREVLDSSNIKPMNLIGVDRGENIPAVIALTDPEGCPLSRFKDSLGNPTHILRIGESYKEKQRTIQAKKEVEQRRAGGYSRKYASKAKNLADDMVRNTARDLLYYAVTQDAMLIFENLSRGFGRQGKRTFMAERQYTRMEDWLTAKLAYEGLPSKTYLSKTLAQYTSKTCSNCGFTITSADYDRVLEKLKKTATGWMTTINGKELKVEGQITYYNRYKRQNVVKDLSVELDRLSEESVNNDISSWTKGRSGEALSLLKKRFSHRPVQEKFVCLNCGFETHADEQAALNIARSWLFLRSQEYKKYQTNKTTGNTDKRAFVETWQSFYRKKLKEVWKPAVGSPAAKRVKLD

SEQ ID NO: 14106 - protein, 1002 aa, synthetic construct
MAPAAKRVKLDSRQEIKRINKIRRRLVKDSNTKKAGKTGPMKTLLVRVMTPDLRERLENLRKKPENIPQPISNTSRANLNKLLTDYTEMKKAILHVYWEEFQKDPVGLMSRVAQPASKKIDQNKLKPEMDEKGNLTTAGFACSQCGQPLFVYKLEQVSEKGKAYTNYFGRCNVAEHEKLILLAQLKPEKDSDEAVTYSLGKFGQRALDFYSIHVTKESTHPVKPLAQIAGNRYASGPVGKALSDACMGTIASFLSKYQDIIIEHQKVVKGNQKRLESLRELAGKENLEYPSVTLPPQPHTKEGVDAYNEVIARVRMWVNLNLWQKLKLSRDDAKPLLRLKKFPSFPLVERQANEVDWWDMVCNVKKLINEKKEDGKVFWQNLAGYKRQEALRPYLSSEEDRKKGKKFARYQLGDLLLHLEKKHGEDWGKVYDEAWERIDKKVEGLSKHIKLEEERRSEDAQSKAALTDWLRAKASFVIEGLKEADKDEFCRCELKLQKWYGDLRGKPFAIEAENSILDISGFSKQYNCAFIWQKDGVKKLNLYLIINYFKGGKLRFKKIKPEAFEANRFYTVINKKSGEIVPMEVNFNFDDPNLIILPLAFGKRQGREFIWNDLLSLETGSLKLANGRVIEKTLYNRRTRQDEPALFVALTFERREVLDSSNIKPMNLIGVDRGENIPAVIALTDPEGCPLSRFKDSLGNPTHILRIGESYKEKQRTIQAKKEVEQRRAGGYSRKYASKAKNLADDMVRNTARDLLYYAVTQDAMLIFENLSRGFGRQGKRTFMAERQYTRMEDWLTAKLAYEGLPSKTYLSKTLAQYTSKTCSNCGFTITSADYDRVLEKLKKTATGWMTTINGKELKVEGQITYYNRYKRQNVVKDLSVELDRLSEESVNNDISSWTKGRSGEALSLLKKRFSHRPVQEKFVCLNCGFETHADEQAALNIARSWLFLRSQEYKKYQTNKTTGNTDKRAFVETWQSFYRKKLKEVWKPAVGSPAAKRVKLD

SEQ ID NO: 14107 - RNA, 109 nt, synthetic construct
  source 1..109: mol_type = other RNA
  modified_base 1..4: mod_base = OTHER; note = nucleotides linked via phosphorothioate
  modified_base 106..109: mod_base = OTHER; note = nucleotides linked via phosphorothioate
  modified_base 1: mod_base = OTHER; note = 2'-O-methyl-adenosine
  modified_base 2: mod_base = cm
  modified_base 3: mod_base = um
  modified_base 107: mod_base = cm
  modified_base 108: mod_base = gm
  modified_base 109: mod_base = OTHER; note = 2'-O-methyl-adenosine
actggcgcttctatctgattactctgagcgccatcaccagcgactatgtcgtagtgggtaaagctccctcttcggagggagcatcagaggaggaggacggcctggccga

SEQ ID NO: 14108 - RNA, 109 nt, synthetic construct; identical to SEQ ID NO: 14002
  source 1..109: mol_type = other RNA
  modified_base 1..4: mod_base = OTHER; note = nucleotides linked via phosphorothioate
  modified_base 106..109: mod_base = OTHER; note = nucleotides linked via phosphorothioate
  modified_base 1: mod_base = OTHER; note = 2'-O-methyl-adenosine
  modified_base 2: mod_base = cm
  modified_base 3: mod_base = um
  modified_base 107: mod_base = um
  modified_base 108: mod_base = gm
  modified_base 109: mod_base = OTHER; note = 2'-O-methyl-adenosine

SEQ ID NO: 14109 - DNA, 20 bp, synthetic construct
  source 1..20: mol_type = other DNA
acgggatgctctgggcaaag

SEQ ID NO: 14110 - DNA, 20 bp, synthetic construct
  source 1..20: mol_type = other DNA
gaataaactccaggcctggg

SEQ ID NO: 14111 - DNA, 20 bp, synthetic construct
  source 1..20: mol_type = other DNA
tctgccccaggctgcagctc

SEQ ID NO: 14112 - DNA, 20 bp, synthetic construct
  source 1..20: mol_type = other DNA
cctgctcctgaggggccggg

SEQ ID NO: 14113 - DNA, 20 bp, synthetic construct
  source 1..20: mol_type = other DNA
ggggctgctggcctggccct

SEQ ID NO: 14114 - DNA, 20 bp, synthetic construct
  source 1..20: mol_type = other DNA
tctgtgaagtaggggtgcga

SEQ ID NO: 14115 - DNA, 20 bp, synthetic construct
  source 1..20: mol_type = other DNA
tgctgtgtgagcttggcagg

SEQ ID NO: 14116 - DNA, 20 bp, synthetic construct
  source 1..20: mol_type = other DNA
ccttcccagcctcactgtta

SEQ ID NO: 14117 - DNA, 20 bp, synthetic construct
  source 1..20: mol_type = other DNA
gttatcacccaggcctgatt

SEQ ID NO: 14118 - DNA, 20 bp, synthetic construct
  source 1..20: mol_type = other DNA
ctggcctggcggagatgctt

SEQ ID NO: 14119 - DNA, 20 bp, synthetic construct
  source 1..20: mol_type = other DNA
aaggcatggtcgggggagag

SEQ ID NO: 14120 - DNA, 20 bp, synthetic construct
  source 1..20: mol_type = other DNA
agacctgttttgcttttgta

SEQ ID NO: 14121 - DNA, 20 bp, synthetic construct
  source 1..20: mol_type = other DNA
agttacaaaagcaaaacagg

SEQ ID NO: 14122 - DNA, 20 bp, synthetic construct
  source 1..20: mol_type = other DNA
gcgcgccccttcacgcgccc

SEQ ID NO: 14123 - RNA, 20 nt, synthetic construct
  source 1..20: mol_type = other RNA
agaagatgggcgggagtctt

SEQ ID NO: 14124 - RNA, 20 nt, synthetic construct
  source 1..20: mol_type = other RNA
ggccgagatgtctcgctccg

SEQ ID NO: 14125 - DNA, 20 bp, synthetic construct
  source 1..20: mol_type = other DNA
cgagacgtaattacgtctcg

SEQ ID NO: 14126 - protein, 978 aa, synthetic construct
QEGKRINKIRRRLVKDSNTKKAGKTGPMKTLLVRVMTPDLRERLENLRKKPENIPQPISNTSQANLNKLLTDYTEMKKAILHVYWEEFQKDPVGLMSRVAQPASKKIDQNKLKPEMDEKGNLTTAGFACSQCGQPLFVYKLEQVSEKGKAYTNYFGRCNVAEHEKLILLAQLKPEKDSDEAVTYSLGKFGQRALDFYSIHVTKESTHPVKPLAQIAGNRYASGPVGKALSDACMGTIASFLSKYQDIIIEHQKVVKGNQKRLESLRELAGKENLEYPSVTLPPQPHTKEGVDAYNEVIARVRMWVNLNLWQKLKLSRDDAKPLLRLKGFPSFPLVERQANEVDWWDMVCNVKKLINEKKEDGKVFWQNLAGYKRQEALRPYLSSEEDRKKGKKFARYQLGDLLLHLEKKHGEDWGKVYDEAWERIDKKVEGLSKHIKLEEERRSEDAQSKAALTDWLRAKASFVIEGLKEADKDEFCRCELKLQKWYGDLRGKPFAIEAENSILDISGFSKQYNCAFIWQKDGVKKLNLYLIINYFKGGKLRFKKIKPEAFEANRFYTVINKKSGEIVPMEVNFNFDDPNLIILPLAFGKRQGREFIWNDLLSLETGSLKLANGRVIEKTLYNRRTRQDEPALFVALTFERREVLDSSNIKPMNLIGVDRGENIPAVIALTDPEGCPLSRFKDSLGNPTHILRIGESYKEKQRTIQAKKEVEQRRAGGYSRKYASKAKNLADDMVRNTARDLLYYAVTQDAMLIFENLSRGFGRQGKRTFMAERQYTRMEDWLTAKLAYEGLPSKTYLSKTLAQYTSKTCSNCGFTITSADYDRVLEKLKKTATGWMTTINGKELKVEGQITYYNRYKRQNVVKDLSVELDRLSEESVNNDISSWTKGRSGEALSLLKKRFSHRPVQEKFVCLNCGFETHADEQAALNIARSWLFLRSQEYKKYQTNKTTGNTDKRAFVETWQSFYRKKLKEVWKPAV

SEQ ID NO: 14127 - protein, 978 aa, synthetic construct
QEGKRINKIRRRLVKDSNTKKAGKTGPMKTLLVRVMTPDLRERLENLRKKPENIPQPISNTSRANLNKLLTDYTEMKKAILHVYWEEFQKDPVGLMSRVAQPASKKIDQNKLKPEMDEKGNLTTAGFACSQCGQPLFVYKLEQVSEKGKAYTNYFGRCNVAEHEKLIKLAQLKPEKDSDEAVTYSLGKFGQRALDFYSIHVTKESTHPVKPLAQIAGNRYASGPVGKALSDACMGTIASFLSKYQDIIIEHQKVVKGNQKRLESLRELAGKENLEYPSVTLPPQPHTKEGVDAYNEVIARVRMWVNLNLWQKLKLSRDDAKPLLRLKGFPSFPLVERQANEVDWWDMVCNVKKLINEKKEDGKVFWQNLAGYKRQEALRPYLSSEEDRKKGKKFARYQLGDLLLHLEKKHGEDWGKVYDEAWERIDKKVEGLSKHIKLEEERRSEDAQSKAALTDWLRAKASFVIEGLKEADKDEFCRCELKLQKWYGDLRGKPFAIEAENSILDISGFSKQYNCAFIWQKDGVKKLNLYLIINYFKGGKLRFKKIKPEAFEANRFYTVINKKSGEIVPMEVNFNFDDPNLIILPLAFGKRQGREFIWNDLLSLETGSLKLANGRVIEKTLYNRRTRQDEPALFVALTFERREVLDSSNIKPMNLIGVDRGENIPAVIALTDPEGCPLSRFKDSLGNPTHILRIGESYKEKQRTIQAKKEVEQRRAGGYSRKYASKAKNLADDMVRNTARDLLYYAVTQDAMLIFENLSRGFGRQGKRTFMAERQYTRMEDWLTAKLAYEGLPSKTYLSKTLAQYTSKTCSNCGFTITSADYDRVLEKLKKTATGWMTTINGKELKVEGQITYYNRYKRQNVVKDLSVELDRLSEESVNNDISSWTKGRSGEALSLLKKRFSHRPVQEKFVCLNCGFETHADEQAALNIARSWLFLRSQEYKKYQTNKTTGNTDKRAFVETWQSFYRKKLKEVWKPAV

SEQ ID NO: 14128 - protein, 978 aa, synthetic construct
QEGKRINKIRRRLVKDSNTKKAGKTGPMKTLLVRVMTPDLRERLENLRKKPENIPQPISNTSRANLNKLLTDYTEMKKAILHVYWEEFQKDPVGLMSRVAQPASKKIDQNKLKPEMDEKGNLTTAGFACSQCGQPLFVYKLEQVSEKGKAYTNYFGRCNVAEHEKLIQLAQLKPEKDSDEAVTYSLGKFGQRALDFYSIHVTKESTHPVKPLAQIAGNRYASGPVGKALSDACMGTIASFLSKYQDIIIEHQKVVKGNQKRLESLRELAGKENLEYPSVTLPPQPHTKEGVDAYNEVIARVRMWVNLNLWQKLKLSRDDAKPLLRLKGFPSFPLVERQANEVDWWDMVCNVKKLINEKKEDGKVFWQNLAGYKRQEALRPYLSSEEDRKKGKKFARYQLGDLLLHLEKKHGEDWGKVYDEAWERIDKKVEGLSKHIKLEEERRSEDAQSKAALTDWLRAKASFVIEGLKEADKDEFCRCELKLQKWYGDLRGKPFAIEAENSILDISGFSKQYNCAFIWQKDGVKKLNLYLIINYFKGGKLRFKKIKPEAFEANRFYTVINKKSGEIVPMEVNFNFDDPNLIILPLAFGKRQGREFIWNDLLSLETGSLKLANGRVIEKTLYNRRTRQDEPALFVALTFERREVLDSSNIKPMNLIGVDRGENIPAVIALTDPEGCPLSRFKDSLGNPTHILRIGESYKEKQRTIQAKKEVEQRRAGGYSRKYASKAKNLADDMVRNTARDLLYYAVTQDAMLIFENLSRGFGRQGKRTFMAERQYTRMEDWLTAKLAYEGLPSKTYLSKTLAQYTSKTCSNCGFTITSADYDRVLEKLKKTATGWMTTINGKELKVEGQITYYNRYKRQNVVKDLSVELDRLSEESVNNDISSWTKGRSGEALSLLKKRFSHRPVQEKFVCLNCGFETHADEQAALNIARSWLFLRSQEYKKYQTNKTTGNTDKRAFVETWQSFYRKKLKEVWKPAV

SEQ ID NO: 14129 - protein, 978 aa, synthetic construct
QEGKRINKIRRRLVKDSNTKKAGKTGPMKTLLVRVMTPDLRERLENLRKKPENIPQPISNTSRANLNKLLTDYTEMKKAILHVYWEEFQKDPVGLMSRVAQPASKKIDQNKLKPEMDEKGNLTTAGFACSQCGQPLFVYKLEQVSEKGKAYTNYFGRCNVAEHEKLILLDQLKPEKDSDEAVTYSLGKFGQRALDFYSIHVTKESTHPVKPLAQIAGNRYASGPVGKALSDACMGTIASFLSKYQDIIIEHQKVVKGNQKRLESLRELAGKENLEYPSVTLPPQPHTKEGVDAYNEVIARVRMWVNLNLWQKLKLSRDDAKPLLRLKGFPSFPLVERQANEVDWWDMVCNVKKLINEKKEDGKVFWQNLAGYKRQEALRPYLSSEEDRKKGKKFARYQLGDLLLHLEKKHGEDWGKVYDEAWERIDKKVEGLSKHIKLEEERRSEDAQSKAALTDWLRAKASFVIEGLKEADKDEFCRCELKLQKWYGDLRGKPFAIEAENSILDISGFSKQYNCAFIWQKDGVKKLNLYLIINYFKGGKLRFKKIKPEAFEANRFYTVINKKSGEIVPMEVNFNFDDPNLIILPLAFGKRQGREFIWNDLLSLETGSLKLANGRVIEKTLYNRRTRQDEPALFVALTFERREVLDSSNIKPMNLIGVDRGENIPAVIALTDPEGCPLSRFKDSLGNPTHILRIGESYKEKQRTIQAKKEVEQRRAGGYSRKYASKAKNLADDMVRNTARDLLYYAVTQDAMLIFENLSRGFGRQGKRTFMAERQYTRMEDWLTAKLAYEGLPSKTYLSKTLAQYTSKTCSNCGFTITSADYDRVLEKLKKTATGWMTTINGKELKVEGQITYYNRYKRQNVVKDLSVELDRLSEESVNNDISSWTKGRSGEALSLLKKRFSHRPVQEKFVCLNCGFETHADEQAALNIARSWLFLRSQEYKKYQTNKTTGNTDKRAFVETWQSFYRKKLKEVWKPAV

SEQ ID NO: 14130 - protein, 978 aa, synthetic construct
QEGKRINKIRRRLVKDSNTKKAGKTGPMKTLLVRVMTPDLRERLENLRKKPENIPQPISNTSRANLNKLLTDYTEMKKAILHVYWEEFQKDPVGLMSRVAQPASKKIDQNKLKPEMDEKGNLTTAGFACSQCGQPLFVYKLEQVSEKGKAYTNYFGRCNVAEHEKLILLYQLKPEKDSDEAVTYSLGKFGQRALDFYSIHVTKESTHPVKPLAQIAGNRYASGPVGKALSDACMGTIASFLSKYQDIIIEHQKVVKGNQKRLESLRELAGKENLEYPSVTLPPQPHTKEGVDAYNEVIARVRMWVNLNLWQKLKLSRDDAKPLLRLKGFPSFPLVERQANEVDWWDMVCNVKKLINEKKEDGKVFWQNLAGYKRQEALRPYLSSEEDRKKGKKFARYQLGDLLLHLEKKHGEDWGKVYDEAWERIDKKVEGLSKHIKLEEERRSEDAQSKAALTDWLRAKASFVIEGLKEADKDEFCRCELKLQKWYGDLRGKPFAIEAENSILDISGFSKQYNCAFIWQKDGVKKLNLYLIINYFKGGKLRFKKIKPEAFEANRFYTVINKKSGEIVPMEVNFNFDDPNLIILPLAFGKRQGREFIWNDLLSLETGSLKLANGRVIEKTLYNRRTRQDEPALFVALTFERREVLDSSNIKPMNLIGVDRGENIPAVIALTDPEGCPLSRFKDSLGNPTHILRIGESYKEKQRTIQAKKEVEQRRAGGYSRKYASKAKNLADDMVRNTARDLLYYAVTQDAMLIFENLSRGFGRQGKRTFMAERQYTRMEDWLTAKLAYEGLPSKTYLSKTLAQYTSKTCSNCGFTITSADYDRVLEKLKKTATGWMTTINGKELKVEGQITYYNRYKRQNVVKDLSVELDRLSEESVNNDISSWTKGRSGEALSLLKKRFSHRPVQEKFVCLNCGFETHADEQAALNIARSWLFLRSQEYKKYQTNKTTGNTDKRAFVETWQSFYRKKLKEVWKPAV

SEQ ID NO: 14131 - protein, 978 aa, synthetic construct
QEGKRINKIRRRLVKDSNTKKAGKTGPMKTLLVRVMTPDLRERLENLRKKPENIPQPISNTSRANLNKLLTDYTEMKKAILHVYWEEFQKDPVGLMSRVAQPASKKIDQNKLKPEMDEKGNLTTAGFACSQCGQPLFVYKLEQVSEKGKAYTNYFGRCNVAEHEKLILLSQLKPEKDSDEAVTYSLGKFGQRALDFYSIHVTKESTHPVKPLAQIAGNRYASGPVGKALSDACMGTIASFLSKYQDIIIEHQKVVKGNQKRLESLRELAGKENLEYPSVTLPPQPHTKEGVDAYNEVIARVRMWVNLNLWQKLKLSRDDAKPLLRLKGFPSFPLVERQANEVDWWDMVCNVKKLINEKKEDGKVFWQNLAGYKRQEALRPYLSSEEDRKKGKKFARYQLGDLLLHLEKKHGEDWGKVYDEAWERIDKKVEGLSKHIKLEEERRSEDAQSKAALTDWLRAKASFVIEGLKEADKDEFCRCELKLQKWYGDLRGKPFAIEAENSILDISGFSKQYNCAFIWQKDGVKKLNLYLIINYFKGGKLRFKKIKPEAFEANRFYTVINKKSGEIVPMEVNFNFDDPNLIILPLAFGKRQGREFIWNDLLSLETGSLKLANGRVIEKTLYNRRTRQDEPALFVALTFERREVLDSSNIKPMNLIGVDRGENIPAVIALTDPEGCPLSRFKDSLGNPTHILRIGESYKEKQRTIQAKKEVEQRRAGGYSRKYASKAKNLADDMVRNTARDLLYYAVTQDAMLIFENLSRGFGRQGKRTFMAERQYTRMEDWLTAKLAYEGLPSKTYLSKTLAQYTSKTCSNCGFTITSADYDRVLEKLKKTATGWMTTINGKELKVEGQITYYNRYKRQNVVKDLSVELDRLSEESVNNDISSWTKGRSGEALSLLKKRFSHRPVQEKFVCLNCGFETHADEQAALNIARSWLFLRSQEYKKYQTNKTTGNTDKRAFVETWQSFYRKKLKEVWKPAV

SEQ ID NO: 14132 - protein, 978 aa, synthetic construct
QEGKRINKIRRRLVKDSNTKKAGKTGPMKTLLVRVMTPDLRERLENLRKKPENIPQPISNTSRANLNKLLTDYTEMKKAILHVYWEEFQKDPVGLMSRVAQPASKKIDQNKLKPEMDEKGNLTTAGFACSQCGQPLFVYKLEQVSEKGKAYTNYFGRCNVAEHEKLILLAQLKPEKDSDEAVTYSLGKFGQRALDFYSIHVTKESTHPVKPLAQIAGNRYASTPVGKALSDACMGTIASFLSKYQDIIIEHQKVVKGNQKRLESLRELAGKENLEYPSVTLPPQPHTKEGVDAYNEVIARVRMWVNLNLWQKLKLSRDDAKPLLRLKGFPSFPLVERQANEVDWWDMVCNVKKLINEKKEDGKVFWQNLAGYKRQEALRPYLSSEEDRKKGKKFARYQLGDLLLHLEKKHGEDWGKVYDEAWERIDKKVEGLSKHIKLEEERRSEDAQSKAALTDWLRAKASFVIEGLKEADKDEFCRCELKLQKWYGDLRGKPFAIEAENSILDISGFSKQYNCAFIWQKDGVKKLNLYLIINYFKGGKLRFKKIKPEAFEANRFYTVINKKSGEIVPMEVNFNFDDPNLIILPLAFGKRQGREFIWNDLLSLETGSLKLANGRVIEKTLYNRRTRQDEPALFVALTFERREVLDSSNIKPMNLIGVDRGENIPAVIALTDPEGCPLSRFKDSLGNPTHILRIGESYKEKQRTIQAKKEVEQRRAGGYSRKYASKAKNLADDMVRNTARDLLYYAVTQDAMLIFENLSRGFGRQGKRTFMAERQYTRMEDWLTAKLAYEGLPSKTYLSKTLAQYTSKTCSNCGFTITSADYDRVLEKLKKTATGWMTTINGKELKVEGQITYYNRYKRQNVVKDLSVELDRLSEESVNNDISSWTKGRSGEALSLLKKRFSHRPVQEKFVCLNCGFETHADEQAALNIARSWLFLRSQEYKKYQTNKTTGNTDKRAFVETWQSFYRKKLKEVWKPAV

SEQ ID NO: 14133 - protein, 978 aa, synthetic construct
QEGKRINKIRRRLVKDSNTKKAGKTGPMKTLLVRVMTPDLRERLENLRKKPENIPQPISNTSRANLNKLLTDYTEMKKAILHVYWEEFQKDPVGLMSRVAQPASKKIDQNKLKPEMDEKGNLTTAGFACSQCGQPLFVYKLEQVSEKGKAYTNYFGRCNVAEHEKLILLAQLKPEKDSDEAVTYSLGKFGQRALDFYSIHVTKESTHPVKPLAQIAGNRYASGPVGKALSDACMGTIASFLSKYQDIIIEHQKVVKGNQKRLESLRELAGKENLEYPSVTLPPQPHTKEGVDAYNEVIARVRTWVNLNLWQKLKLSRDDAKPLLRLKGFPSFPLVERQANEVDWWDMVCNVKKLINEKKEDGKVFWQNLAGYKRQEALRPYLSSEEDRKKGKKFARYQLGDLLLHLEKKHGEDWGKVYDEAWERIDKKVEGLSKHIKLEEERRSEDAQSKAALTDWLRAKASFVIEGLKEADKDEFCRCELKLQKWYGDLRGKPFAIEAENSILDISGFSKQYNCAFIWQKDGVKKLNLYLIINYFKGGKLRFKKIKPEAFEANRFYTVINKKSGEIVPMEVNFNFDDPNLIILPLAFGKRQGREFIWNDLLSLETGSLKLANGRVIEKTLYNRRTRQDEPALFVALTFERREVLDSSNIKPMNLIGVDRGENIPAVIALTDPEGCPLSRFKDSLGNPTHILRIGESYKEKQRTIQAKKEVEQRRAGGYSRKYASKAKNLADDMVRNTARDLLYYAVTQDAMLIFENLSRGFGRQGKRTFMAERQYTRMEDWLTAKLAYEGLPSKTYLSKTLAQYTSKTCSNCGFTITSADYDRVLEKLKKTATGWMTTINGKELKVEGQITYYNRYKRQNVVKDLSVELDRLSEESVNNDISSWTKGRSGEALSLLKKRFSHRPVQEKFVCLNCGFETHADEQAALNIARSWLFLRSQEYKKYQTNKTTGNTDKRAFVETWQSFYRKKLKEVWKPAV

SEQ ID NO: 14134 - protein, 978 aa, synthetic construct
QEGKRINKIRRRLVKDSNTKKAGKTGPMKTLLVRVMTPDLRERLENLRKKPENIPQPISNTSRANLNKLLTDYTEMKKAILHVYWEEFQKDPVGLMSRVAQPASKKIDQNKLKPEMDEKGNLTTAGFACSQCGQPLFVYKLEQVSEKGKAYTNYFGRCNVAEHEKLILLAQLKPEKDSDEAVTYSLGKFGQRALDFYSIHVTKESTHPVKPLAQIAGNRYASGPVGKALSDACMGTIASFLSKYQDIIIEHQKVVKGNQKRLESLRELAGKENLEYPSVTLPPQPHTKEGVDAYNEVIARVRMWVNLNLWQKLKLSRDDAKPLLRLKGFPSFPLVERQANEVDWWDMVCNVKKLINEKKEDGKVFWQNLAGYKRQEALRPYLSSEEDRKKGKKFARTQLGDLLLHLEKKHGEDWGKVYDEAWERIDKKVEGLSKHIKLEEERRSEDAQSKAALTDWLRAKASFVIEGLKEADKDEFCRCELKLQKWYGDLRGKPFAIEAENSILDISGFSKQYNCAFIWQKDGVKKLNLYLIINYFKGGKLRFKKIKPEAFEANRFYTVINKKSGEIVPMEVNFNFDDPNLIILPLAFGKRQGREFIWNDLLSLETGSLKLANGRVIEKTLYNRRTRQDEPALFVALTFERREVLDSSNIKPMNLIGVDRGENIPAVIALTDPEGCPLSRFKDSLGNPTHILRIGESYKEKQRTIQAKKEVEQRRAGGYSRKYASKAKNLADDMVRNTARDLLYYAVTQDAMLIFENLSRGFGRQGKRTFMAERQYTRMEDWLTAKLAYEGLPSKTYLSKTLAQYTSKTCSNCGFTITSADYDRVLEKLKKTATGWMTTINGKELKVEGQITYYNRYKRQNVVKDLSVELDRLSEESVNNDISSWTKGRSGEALSLLKKRFSHRPVQEKFVCLNCGFETHADEQAALNIARSWLFLRSQEYKKYQTNKTTGNTDKRAFVETWQSFYRKKLKEVWKPAV

SEQ ID NO: 14135 - protein, 978 aa, synthetic construct
QEGKRINKIRRRLVKDSNTKKAGKTGPMKTLLVRVMTPDLRERLENLRKKPENIPQPISNTSRANLNKLLTDYTEMKKAILHVYWEEFQKDPVGLMSRVAQPASKKIDQNKLKPEMDEKGNLTTAGFACSQCGQPLFVYKLEQVSEKGKAYTNYFGRCNVAEHEKLILLAQLKPEKDSDEAVTYSLGKFGQRALDFYSIHVTKESTHPVKPLAQIAGNRYASGPVGKALSDACMGTIASFLSKYQDIIIEHQKVVKGNQKRLESLRELAGKENLEYPSVTLPPQPHTKEGVDAYNEVIARVRMWVNLNLWQKLKLSRDDAKPLLRLKGFPSFPLVERQANEVDWWDMVCNVKKLINEKKEDGKVFWQNLAGYKRQEALRPYLSSEEDRKKGKKFARYQLGDLLLHLEKKHGEDWGKVYDEAWERIDKKVEGLSKHIKLEEERRSEDAQSKAALTDWLRAKASFVIEGLKEADKDEFCRCELKLQKWYGDLRGKPFAIEAENSILDISGFSKQYNCAFIWQKDGVKKLNLYLIINYFKGGKLRFKKIKPEAFEANRFYTVINKKSGEIVPMEVNFNFDDPNLIILPLAFGKRQGREFIWNDLLSLETGSLKLANGRVIEKTLYNRRTRQDEPALFVALTFERREVLDSSNIKPMNLIGVDRGENIPAVIALTDPEGCPLSRFKDSLGNPTHILRIGESYKEKQRTIQAKKEVEQRRAGGYSRKYASKAKNLADDMVRNTARDLLYYAVTQDAMLIFENLSRGFGRQGKRTFMAERQYTRMEDWLTAKLAYEGLPSKTYLSKTLAQYTSKTCSNCGFTITSADYDRMLEKLKKTATGWMTTINGKELKVEGQITYYNRYKRQNVVKDLSVELDRLSEESVNNDISSWTKGRSGEALSLLKKRFSHRPVQEKFVCLNCGFETHADEQAALNIARSWLFLRSQEYKKYQTNKTTGNTDKRAFVETWQSFYRKKLKEVWKPAV

SEQ ID NO: 14136 - protein, 978 aa, synthetic construct
QEGKRINKIRRRLVKDSNTKKAGKTGPMKTLLVRVMTPDLRERLENLRKKPENIPQPISNTSRANLNKLLTDYTEMKKAILHVYWEEFQKDPVGLMSRVAQPASKKIDQNKLKPEMDEKGNLTTAGFACSQCGQPLFVYKLEQVSEKGKAYTNYFGRCNVAEHEKLILLAQLKPEKDSDEAVTYSLGKFGQRALDFYSIHVTKESTHPVKPLAQIAGNRYASGPVGKALSDACMGTIASFLSKYQDIIIEHQKVVKGNQKRLESLRELAGKENLEYPSVTLPPQPHTKEGVDAYNEVIARVRMWVNLNLWQKLKLSRDDAKPLLRLKGFPSFPLVERQANEVDWWDMVCNVKKLINEKKEDGKVFWQNLAGYKRQEALRPYLSSEEDRKKGKKFARYQLGDLLLHLEKKHGEDWGKVYDEAWERIDKKVEGLSKHIKLEEERRSEDAQSKAALTDWLRAKASFVIEGLKEADKDEFCRCELKLQKWYGDLRGKPFAIEAENSILDISGFSKQYNCAFIWQKDGVKKLNLYLIINYFKGGKLRFKKIKPEAFEANRFYTVINKKSGEIVPMEVNFNFDDPNLIILPLAFGKRQGREFIWNDLLSLETGSLKLANGRVIEKTLYNRRTRQDEPALFVALTFERREVLDSSNIKPMNLIGVDRGENIPAVIALTDPEGCPLSRFKDSLGNPTHILRIGESYKEKQRTIQAKKEVEQRRAGGYSRKYASKAKNLADDMVRNTARDLLYYAVTQDAMLIFENLSRGFGRQGKRTFMAERQYTRMEDWLTAKLAYEGLPSKTYLSKTLAQYTSKTCSNCGFTITSADYDRVLEKLKKTATGWMTTINGKELKVEGQITYYNRYKRQNVVKDLSVELDRLSEESVNNDISSWDKGRSGEALSLLKKRFSHRPVQEKFVCLNCGFETHADEQAALNIARSWLFLRSQEYKKYQTNKTTGNTDKRAFVETWQSFYRKKLKEVWKPAV

SEQ ID NO: 14137 - protein, 978 aa, synthetic construct
QEGKRINKIRRRLVKDSNTKKAGKTGPMKTLLVRVMTPDLRERLENLRKKPENIPQPISNTSRANLNKLLTDYTEMKKAILHVYWEEFQKDPVGLMSRVAQPASKKIDQNKLKPEMDEKGNLTTAGFACSQCGQPLFVYKLEQVSEKGKAYTNYFGRCNVAEHEKLILLAQLKPEKDSDEAVTYSLGKFGQRALDFYSIHVTKESTHPVKPLAQIAGNRYASGPVGKALSDACMGTIASFLSKYQDIIIEHQKVVKGNQKRLESLRELAGKENLEYPSVTLPPQPHTKEGVDAYNEVIARVRMWVNLNLWQKLKLSRDDAKPLLRLKGFPSFPLVERQANEVDWWDMVCNVKKLINEKKEDGKVFWQNLAGYKRQEALRPYLSSEEDRKKGKKFARYQLGDLLLHLEKKHGEDWGKVYDEAWERIDKKVEGLSKHIKLEEERRSEDAQSKAALTDWLRAKASFVIEGLKEADKDEFCRCELKLQKWYGDLRGKPFAIEAENSILDISGFSKQYNCAFIWQKDGVKKLNLYLIINYFKGGKLRFKKIKPEAFEANRFYTVINKKSGEIVPMEVNFNFDDPNLIILPLAFGKRQGREFIWNDLLSLETGSLKLANGRVIEKTLYNRRTRQDEPALFVALTFERREVLDSSNIKPMNLIGVDRGENIPAVIALTDPEGCPLSRFKDSLGNPTHILRIGESYKEKQRTIQAKKEVEQRRAGGYSRKYASKAKNLADDMVRNTARDLLYYAVTQDAMLIFENLSRGFGRQGKRTFMAERQYTRMEDWLTAKLAYEGLPSKTYLSKTLAQYTSKTCSNCGFTITSADYDRVLEKLKKTATGWMTTINGKELKVEGQITYYNRYKRQNVVKDLSVELDRLSEESVNNDISSWTKGRQGEALSLLKKRFSHRPVQEKFVCLNCGFETHADEQAALNIARSWLFLRSQEYKKYQTNKTTGNTDKRAFVETWQSFYRKKLKEVWKPAV

SEQ ID NO: 14138 - protein, 979 aa, synthetic construct
QEIGKRINKIRRRLVKDSNTKKAGKTGPMKTLLVRVMTPDLRERLENLRKKPENIPQPISNTSQANLNKLLTDYTEMKKAILHVYWEEFQKDPVGLMSRVAQPASKKIDQNKLKPEMDEKGNLTTAGFACSQCGQPLFVYKLEQVSEKGKAYTNYFGRCNVAEHEKLILLAQLKPEKDSDEAVTYSLGKFGQRALDFYSIHVTKESTHPVKPLAQIAGNRYASGPVGKALSDACMGTIASFLSKYQDIIIEHQKVVKGNQKRLESLRELAGKENLEYPSVTLPPQPHTKEGVDAYNEVIARVRMWVNLNLWQKLKLSRDDAKPLLRLKGFPSFPLVERQANEVDWWDMVCNVKKLINEKKEDGKVFWQNLAGYKRQEALRPYLSSEEDRKKGKKFARYQLGDLLLHLEKKHGEDWGKVYDEAWERIDKKVEGLSKHIKLEEERRSEDAQSKAALTDWLRAKASFVIEGLKEADKDEFCRCELKLQKWYGDLRGKPFAIEAENSILDISGFSKQYNCAFIWQKDGVKKLNLYLIINYFKGGKLRFKKIKPEAFEANRFYTVINKKSGEIVPMEVNFNFDDPNLIILPLAFGKRQGREFIWNDLLSLETGSLKLANGRVIEKTLYNRRTRQDEPALFVALTFERREVLDSSNIKPMNLIGVDRGENIPAVIALTDPEGCPLSRFKDSLGNPTHILRIGESYKEKQRTIQAKKEVEQRRAGGYSRKYASKAKNLADDMVRNTARDLLYYAVTQDAMLIFENLSRGFGRQGKRTFMAERQYTRMEDWLTAKLAYEGLPSKTYLSKTLAQYTSKTCSNCGFTITSADYDRVLEKLKKTATGWMTTINGKELKVEGQITYYNRYKRQNVVKDLSVELDRLSEESVNNDISSWTKGRSGEALSLLKKRFSHRPVQEKFVCLNCGFETHADEQAALNIARSWLFLRSQEYKKYQTNKTTGNTDKRAFVETWQSFYRKKLKEVWKPAV

SEQ ID NO: 14139 - protein, 979 aa, synthetic construct
QEIGKRINKIRRRLVKDSNTKKAGKTGPMKTLLVRVMTPDLRERLENLRKKPENIPQPISNTSRANLNKLLTDYTEMKKAILHVYWEEFQKDPVGLMSRVAQPASKKIDQNKLKPEMDEKGNLTTAGFACSQCGQPLFVYKLEQVSEKGKAYTNYFGRCNVAEHEKLIKLAQLKPEKDSDEAVTYSLGKFGQRALDFYSIHVTKESTHPVKPLAQIAGNRYASGPVGKALSDACMGTIASFLSKYQDIIIEHQKVVKGNQKRLESLRELAGKENLEYPSVTLPPQPHTKEGVDAYNEVIARVRMWVNLNLWQKLKLSRDDAKPLLRLKGFPSFPLVERQANEVDWWDMVCNVKKLINEKKEDGKVFWQNLAGYKRQEALRPYLSSEEDRKKGKKFARYQLGDLLLHLEKKHGEDWGKVYDEAWERIDKKVEGLSKHIKLEEERRSEDAQSKAALTDWLRAKASFVIEGLKEADKDEFCRCELKLQKWYGDLRGKPFAIEAENSILDISGFSKQYNCAFIWQKDGVKKLNLYLIINYFKGGKLRFKKIKPEAFEANRFYTVINKKSGEIVPMEVNFNFDDPNLIILPLAFGKRQGREFIWNDLLSLETGSLKLANGRVIEKTLYNRRTRQDEPALFVALTFERREVLDSSNIKPMNLIGVDRGENIPAVIALTDPEGCPLSRFKDSLGNPTHILRIGESYKEKQRTIQAKKEVEQRRAGGYSRKYASKAKNLADDMVRNTARDLLYYAVTQDAMLIFENLSRGFGRQGKRTFMAERQYTRMEDWLTAKLAYEGLPSKTYLSKTLAQYTSKTCSNCGFTITSADYDRVLEKLKKTATGWMTTINGKELKVEGQITYYNRYKRQNVVKDLSVELDRLSEESVNNDISSWTKGRSGEALSLLKKRFSHRPVQEKFVCLNCGFETHADEQAALNIARSWLFLRSQEYKKYQTNKTTGNTDKRAFVETWQSFYRKKLKEVWKPAV

SEQ ID NO: 14140 - protein, 979 aa, synthetic construct
QEIGKRINKIRRRLVKDSNTKKAGKTGPMKTLLVRVMTPDLRERLENLRKKPENIPQPISNTSRANLNKLLTDYTEMKKAILHVYWEEFQKDPVGLMSRVAQPASKKIDQNKLKPEMDEKGNLTTAGFACSQCGQPLFVYKLEQVSEKGKAYTNYFGRCNVAEHEKLIQLAQLKPEKDSDEAVTYSLGKFGQRALDFYSIHVTKESTHPVKPLAQIAGNRYASGPVGKALSDACMGTIASFLSKYQDIIIEHQKVVKGNQKRLESLRELAGKENLEYPSVTLPPQPHTKEGVDAYNEVIARVRMWVNLNLWQKLKLSRDDAKPLLRLKGFPSFPLVERQANEVDWWDMVCNVKKLINEKKEDGKVFWQNLAGYKRQEALRPYLSSEEDRKKGKKFARYQLGDLLLHLEKKHGEDWGKVYDEAWERIDKKVEGLSKHIKLEEERRSEDAQSKAALTDWLRAKASFVIEGLKEADKDEFCRCELKLQKWYGDLRGKPFAIEAENSILDISGFSKQYNCAFIWQKDGVKKLNLYLIINYFKGGKLRFKKIKPEAFEANRFYTVINKKSGEIVPMEVNFNFDDPNLIILPLAFGKRQGREFIWNDLLSLETGSLKLANGRVIEKTLYNRRTRQDEPALFVALTFERREVLDSSNIKPMNLIGVDRGENIPAVIALTDPEGCPLSRFKDSLGNPTHILRIGESYKEKQRTIQAKKEVEQRRAGGYSRKYASKAKNLADDMVRNTARDLLYYAVTQDAMLIFENLSRGFGRQGKRTFMAERQYTRMEDWLTAKLAYEGLPSKTYLSKTLAQYTSKTCSNCGFTITSADYDRVLEKLKKTATGWMTTINGKELKVEGQITYYNRYKRQNVVKDLSVELDRLSEESVNNDISSWTKGRSGEALSLLKKRFSHRPVQEKFVCLNCGFETHADEQAALNIARSWLFLRSQEYKKYQTNKTTGNTDKRAFVETWQSFYRKKLKEVWKPAV

SEQ ID NO: 14141 - protein, 979 aa, synthetic construct
QEIGKRINKIRRRLVKDSNTKKAGKTGPMKTLLVRVMTPDLRERLENLRKKPENIPQPISNTSRANLNKLLTDYTEMKKAILHVYWEEFQKDPVGLMSRVAQPASKKIDQNKLKPEMDEKGNLTTAGFACSQCGQPLFVYKLEQVSEKGKAYTNYFGRCNVAEHEKLILLDQLKPEKDSDEAVTYSLGKFGQRALDFYSIHVTKESTHPVKPLAQIAGNRYASGPVGKALSDACMGTIASFLSKYQDIIIEHQKVVKGNQKRLESLRELAGKENLEYPSVTLPPQPHTKEGVDAYNEVIARVRMWVNLNLWQKLKLSRDDAKPLLRLKGFPSFPLVERQANEVDWWDMVCNVKKLINEKKEDGKVFWQNLAGYKRQEALRPYLSSEEDRKKGKKFARYQLGDLLLHLEKKHGEDWGKVYDEAWERIDKKVEGLSKHIKLEEERRSEDAQSKAALTDWLRAKASFVIEGLKEADKDEFCRCELKLQKWYGDLRGKPFAIEAENSILDISGFSKQYNCAFIWQKDGVKKLNLYLIINYFKGGKLRFKKIKPEAFEANRFYTVINKKSGEIVPMEVNFNFDDPNLIILPLAFGKRQGREFIWNDLLSLETGSLKLANGRVIEKTLYNRRTRQDEPALFVALTFERREVLDSSNIKPMNLIGVDRGENIPAVIALTDPEGCPLSRFKDSLGNPTHILRIGESYKEKQRTIQAKKEVEQRRAGGYSRKYASKAKNLADDMVRNTARDLLYYAVTQDAMLIFENLSRGFGRQGKRTFMAERQYTRMEDWLTAKLAYEGLPSKTYLSKTLAQYTSKTCSNCGFTITSADYDRVLEKLKKTATGWMTTINGKELKVEGQITYYNRYKRQNVVKDLSVELDRLSEESVNNDISSWTKGRSGEALSLLKKRFSHRPVQEKFVCLNCGFETHADEQAALNIARSWLFLRSQEYKKYQTNKTTGNTDKRAFVETWQSFYRKKLKEVWKPAV

SEQ ID NO: 14142 - protein, 979 aa, synthetic construct
QEIGKRINKIRRRLVKDSNTKKAGKTGPMKTLLVRVMTPDLRERLENLRKKPENIPQPISNTSRANLNKLLTDYTEMKKAILHVYWEEFQKDPVGLMSRVAQPASKKIDQNKLKPEMDEKGNLTTAGFACSQCGQPLFVYKLEQVSEKGKAYTNYFGRCNVAEHEKLILLYQLKPEKDSDEAVTYSLGKFGQRALDFYSIHVTKESTHPVKPLAQIAGNRYASGPVGKALSDACMGTIASFLSKYQDIIIEHQKVVKGNQKRLESLRELAGKENLEYPSVTLPPQPHTKEGVDAYNEVIARVRMWVNLNLWQKLKLSRDDAKPLLRLKGFPSFPLVERQANEVDWWDMVCNVKKLINEKKEDGKVFWQNLAGYKRQEALRPYLSSEEDRKKGKKFARYQLGDLLLHLEKKHGEDWGKVYDEAWERIDKKVEGLSKHIKLEEERRSEDAQSKAALTDWLRAKASFVIEGLKEADKDEFCRCELKLQKWYGDLRGKPFAIEAENSILDISGFSKQYNCAFIWQKDGVKKLNLYLIINYFKGGKLRFKKIKPEAFEANRFYTVINKKSGEIVPMEVNFNFDDPNLIILPLAFGKRQGREFIWNDLLSLETGSLKLANGRVIEKTLYNRRTRQDEPALFVALTFERREVLDSSNIKPMNLIGVDRGENIPAVIALTDPEGCPLSRFKDSLGNPTHILRIGESYKEKQRTIQAKKEVEQRRAGGYSRKYASKAKNLADDMVRNTARDLLYYAVTQDAMLIFENLSRGFGRQGKRTFMAERQYTRMEDWLTAKLAYEGLPSKTYLSKTLAQYTSKTCSNCGFTITSADYDRVLEKLKKTATGWMTTINGKELKVEGQITYYNRYKRQNVVKDLSVELDRLSEESVNNDISSWTKGRSGEALSLLKKRFSHRPVQEKFVCLNCGFETHADEQAALNIARSWLFLRSQEYKKYQTNKTTGNTDKRAFVETWQSFYRKKLKEVWKPAV

SEQ ID NO: 14143 - protein, 979 aa, synthetic construct
QEIGKRINKIRRRLVKDSNTKKAGKTGPMKTLLVRVMTPDLRERLENLRKKPENIPQPISNTSRANLNKLLTDYTEMKKAILHVYWEEFQKDPVGLMSRVAQPASKKIDQNKLKPEMDEKGNLTTAGFACSQCGQPLFVYKLEQVSEKGKAYTNYFGRCNVAEHEKLILLSQLKPEKDSDEAVTYSLGKFGQRALDFYSIHVTKESTHPVKPLAQIAGNRYASGPVGKALSDACMGTIASFLSKYQDIIIEHQKVVKGNQKRLESLRELAGKENLEYPSVTLPPQPHTKEGVDAYNEVIARVRMWVNLNLWQKLKLSRDDAKPLLRLKGFPSFPLVERQANEVDWWDMVCNVKKLINEKKEDGKVFWQNLAGYKRQEALRPYLSSEEDRKKGKKFARYQLGDLLLHLEKKHGEDWGKVYDEAWERIDKKVEGLSKHIKLEEERRSEDAQSKAALTDWLRAKASFVIEGLKEADKDEFCRCELKLQKWYGDLRGKPFAIEAENSILDISGFSKQYNCAFIWQKDGVKKLNLYLIINYFKGGKLRFKKIKPEAFEANRFYTVINKKSGEIVPMEVNFNFDDPNLIILPLAFGKRQGREFIWNDLLSLETGSLKLANGRVIEKTLYNRRTRQDEPALFVALTFERREVLDSSNIKPMNLIGVDRGENIPAVIALTDPEGCPLSRFKDSLGNPTHILRIGESYKEKQRTIQAKKEVEQRRAGGYSRKYASKAKNLADDMVRNTARDLLYYAVTQDAMLIFENLSRGFGRQGKRTFMAERQYTRMEDWLTAKLAYEGLPSKTYLSKTLAQYTSKTCSNCGFTITSADYDRVLEKLKKTATGWMTTINGKELKVEGQITYYNRYKRQNVVKDLSVELDRLSEESVNNDISSWTKGRSGEALSLLKKRFSHRPVQEKFVCLNCGFETHADEQAALNIARSWLFLRSQEYKKYQTNKTTGNTDKRAFVETWQSFYRKKLKEVWKPAV

SEQ ID NO: 14144 - protein, 979 aa, synthetic construct
QEIGKRINKIRRRLVKDSNTKKAGKTGPMKTLLVRVMTPDLRERLENLRKKPENIPQPISNTSRANLNKLLTDYTEMKKAILHVYWEEFQKDPVGLMSRVAQPASKKIDQNKLKPEMDEKGNLTTAGFACSQCGQPLFVYKLEQVSEKGKAYTNYFGRCNVAEHEKLILLAQLKPEKDSDEAVTYSLGKFGQRALDFYSIHVTKESTHPVKPLAQIAGNRYASTPVGKALSDACMGTIASFLSKYQDIIIEHQKVVKGNQKRLESLRELAGKENLEYPSVTLPPQPHTKEGVDAYNEVIARVRMWVNLNLWQKLKLSRDDAKPLLRLKGFPSFPLVERQANEVDWWDMVCNVKKLINEKKEDGKVFWQNLAGYKRQEALRPYLSSEEDRKKGKKFARYQLGDLLLHLEKKHGEDWGKVYDEAWERIDKKVEGLSKHIKLEEERRSEDAQSKAALTDWLRAKASFVIEGLKEADKDEFCRCELKLQKWYGDLRGKPFAIEAENSILDISGFSKQYNCAFIWQKDGVKKLNLYLIINYFKGGKLRFKKIKPEAFEANRFYTVINKKSGEIVPMEVNFNFDDPNLIILPLAFGKRQGREFIWNDLLSLETGSLKLANGRVIEKTLYNRRTRQDEPALFVALTFERREVLDSSNIKPMNLIGVDRGENIPAVIALTDPEGCPLSRFKDSLGNPTHILRIGESYKEKQRTIQAKKEVEQRRAGGYSRKYASKAKNLADDMVRNTARDLLYYAVTQDAMLIFENLSRGFGRQGKRTFMAERQYTRMEDWLTAKLAYEGLPSKTYLSKTLAQYTSKTCSNCGFTITSADYDRVLEKLKKTATGWMTTINGKELKVEGQITYYNRYKRQNVVKDLSVELDRLSEESVNNDISSWTKGRSGEALSLLKKRFSHRPVQEKFVCLNCGFETHADEQAALNIARSWLFLRSQEYKKYQTNKTTGNTDKRAFVETWQSFYRKKLKEVWKPAV

SEQ ID NO: 14145 - protein, 979 aa, synthetic construct
QEIGKRINKIRRRLVKDSNTKKAGKTGPMKTLLVRVMTPDLRERLENLRKKPENIPQPISNTSRANLNKLLTDYTEMKKAILHVYWEEFQKDPVGLMSRVAQPASKKIDQNKLKPEMDEKGNLTTAGFACSQCGQPLFVYKLEQVSEKGKAYTNYFGRCNVAEHEKLILLAQLKPEKDSDEAVTYSLGKFGQRALDFYSIHVTKESTHPVKPLAQIAGNRYASGPVGKALSDACMGTIASFLSKYQDIIIEHQKVVKGNQKRLESLRELAGKENLEYPSVTLPPQPHTKEGVDAYNEVIARVRTWVNLNLWQKLKLSRDDAKPLLRLKGFPSFPLVERQANEVDWWDMVCNVKKLINEKKEDGKVFWQNLAGYKRQEALRPYLSSEEDRKKGKKFARYQLGDLLLHLEKKHGEDWGKVYDEAWERIDKKVEGLSKHIKLEEERRSEDAQSKAALTDWLRAKASFVIEGLKEADKDEFCRCELKLQKWYGDLRGKPFAIEAENSILDISGFSKQYNCAFIWQKDGVKKLNLYLIINYFKGGKLRFKKIKPEAFEANRFYTVINKKSGEIVPMEVNFNFDDPNLIILPLAFGKRQGREFIWNDLLSLETGSLKLANGRVIEKTLYNRRTRQDEPALFVALTFERREVLDSSNIKPMNLIGVDRGENIPAVIALTDPEGCPLSRFKDSLGNPTHILRIGESYKEKQRTIQAKKEVEQRRAGGYSRKYASKAKNLADDMVRNTARDLLYYAVTQDAMLIFENLSRGFGRQGKRTFMAERQYTRMEDWLTAKLAYEGLPSKTYLSKTLAQYTSKTCSNCGFTITSADYDRVLEKLKKTATGWMTTINGKELKVEGQITYYNRYKRQNVVKDLSVELDRLSEESVNNDISSWTKGRSGEALSLLKKRFSHRPVQEKFVCLNCGFETHADEQAALNIARSWLFLRSQEYKKYQTNKTTGNTDKRAFVETWQSFYRKKLKEVWKPAV

SEQ ID NO: 14146 - protein, 979 aa, synthetic construct
QEIGKRINKIRRRLVKDSNTKKAGKTGPMKTLLVRVMTPDLRERLENLRKKPENIPQPISNTSRANLNKLLTDYTEMKKAILHVYWEEFQKDPVGLMSRVAQPASKKIDQNKLKPEMDEKGNLTTAGFACSQCGQPLFVYKLEQVSEKGKAYTNYFGRCNVAEHEKLILLAQLKPEKDSDEAVTYSLGKFGQRALDFYSIHVTKESTHPVKPLAQIAGNRYASGPVGKALSDACMGTIASFLSKYQDIIIEHQKVVKGNQKRLESLRELAGKENLEYPSVTLPPQPHTKEGVDAYNEVIARVRMWVNLNLWQKLKLSRDDAKPLLRLKGFPSFPLVERQANEVDWWDMVCNVKKLINEKKEDGKVFWQNLAGYKRQEALRPYLSSEEDRKKGKKFARTQLGDLLLHLEKKHGEDWGKVYDEAWERIDKKVEGLSKHIKLEEERRSEDAQSKAALTDWLRAKASFVIEGLKEADKDEFCRCELKLQKWYGDLRGKPFAIEAENSILDISGFSKQYNCAFIWQKDGVKKLNLYLIINYFKGGKLRFKKIKPEAFEANRFYTVINKKSGEIVPMEVNFNFDDPNLIILPLAFGKRQGREFIWNDLLSLETGSLKLANGRVIEKTLYNRRTRQDEPALFVALTFERREVLDSSNIKPMNLIGVDRGENIPAVIALTDPEGCPLSRFKDSLGNPTHILRIGESYKEKQRTIQAKKEVEQRRAGGYSRKYASKAKNLADDMVRNTARDLLYYAVTQDAMLIFENLSRGFGRQGKRTFMAERQYTRMEDWLTAKLAYEGLPSKTYLSKTLAQYTSKTCSNCGFTITSADYDRVLEKLKKTATGWMTTINGKELKVEGQITYYNRYKRQNVVKDLSVELDRLSEESVNNDISSWTKGRSGEALSLLKKRFSHRPVQEKFVCLNCGFETHADEQAALNIARSWLFLRSQEYKKYQTNKTTGNTDKRAFVETWQSFYRKKLKEVWKPAV

SEQ ID NO: 14147 - protein, 979 aa, synthetic construct
QEIGKRINKIRRRLVKDSNTKKAGKTGPMKTLLVRVMTPDLRERLENLRKKPENIPQPISNTSRANLNKLLTDYTEMKKAILHVYWEEFQKDPVGLMSRVAQPASKKIDQNKLKPEMDEKGNLTTAGFACSQCGQPLFVYKLEQVSEKGKAYTNYFGRCNVAEHEKLILLAQLKPEKDSDEAVTYSLGKFGQRALDFYSIHVTKESTHPVKPLAQIAGNRYASGPVGKALSDACMGTIASFLSKYQDIIIEHQKVVKGNQKRLESLRELAGKENLEYPSVTLPPQPHTKEGVDAYNEVIARVRMWVNLNLWQKLKLSRDDAKPLLRLKGFPSFPLVERQANEVDWWDMVCNVKKLINEKKEDGKVFWQNLAGYKRQEALRPYLSSEEDRKKGKKFARYQLGDLLLHLEKKHGEDWGKVYDEAWERIDKKVEGLSKHIKLEEERRSEDAQSKAALTDWLRAKASFVIEGLKEADKDEFCRCELKLQKWYGDLRGKPFAIEAENSILDISGFSKQYNCAFIWQKDGVKKLNLYLIINYFKGGKLRFKKIKPEAFEANRFYTVINKKSGEIVPMEVNFNFDDPNLIILPLAFGKRQGREFIWNDLLSLETGSLKLANGRVIEKTLYNRRTRQDEPALFVALTFERREVLDSSNIKPMNLIGVDRGENIPAVIALTDPEGCPLSRFKDSLGNPTHILRIGESYKEKQRTIQAKKEVEQRRAGGYSRKYASKAKNLADDMVRNTARDLLYYAVTQDAMLIFENLSRGFGRQGKRTFMAERQYTRMEDWLTAKLAYEGLPSKTYLSKTLAQYTSKTCSNCGFTITSADYDRMLEKLKKTATGWMTTINGKELKVEGQITYYNRYKRQNVVKDLSVELDRLSEESVNNDISSWTKGRSGEALSLLKKRFSHRPVQEKFVCLNCGFETHADEQAALNIARSWLFLRSQEYKKYQTNKTTGNTDKRAFVETWQSFYRKKLKEVWKPAV

SEQ ID NO: 14148 - protein, 979 aa, synthetic construct
QEIGKRINKIRRRLVKDSNTKKAGKTGPMKTLLVRVMTPDLRERLENLRKKPENIPQPISNTSRANLNKLLTDYTEMKKAILHVYWEEFQKDPVGLMSRVAQPASKKIDQNKLKPEMDEKGNLTTAGFACSQCGQPLFVYKLEQVSEKGKAYTNYFGRCNVAEHEKLILLAQLKPEKDSDEAVTYSLGKFGQRALDFYSIHVTKESTHPVKPLAQIAGNRYASGPVGKALSDACMGTIASFLSKYQDIIIEHQKVVKGNQKRLESLRELAGKENLEYPSVTLPPQPHTKEGVDAYNEVIARVRMWVNLNLWQKLKLSRDDAKPLLRLKGFPSFPLVERQANEVDWWDMVCNVKKLINEKKEDGKVFWQNLAGYKRQEALRPYLSSEEDRKKGKKFARYQLGDLLLHLEKKHGEDWGKVYDEAWERIDKKVEGLSKHIKLEEERRSEDAQSKAALTDWLRAKASFVIEGLKEADKDEFCRCELKLQKWYGDLRGKPFAIEAENSILDISGFSKQYNCAFIWQKDGVKKLNLYLIINYFKGGKLRFKKIKPEAFEANRFYTVINKKSGEIVPMEVNFNFDDPNLIILPLAFGKRQGREFIWNDLLSLETGSLKLANGRVIEKTLYNRRTRQDEPALFVALTFERREVLDSSNIKPMNLIGVDRGENIPAVIALTDPEGCPLSRFKDSLGNPTHILRIGESYKEKQRTIQAKKEVEQRRAGGYSRKYASKAKNLADDMVRNTARDLLYYAVTQDAMLIFENLSRGFGRQGKRTFMAERQYTRMEDWLTAKLAYEGLPSKTYLSKTLAQYTSKTCSNCGFTITSADYDRVLEKLKKTATGWMTTINGKELKVEGQITYYNRYKRQNVVKDLSVELDRLSEESVNNDISSWDKGRSGEALSLLKKRFSHRPVQEKFVCLNCGFETHADEQAALNIARSWLFLRSQEYKKYQTNKTTGNTDKRAFVETWQSFYRKKLKEVWKPAV

SEQ ID NO: 14149 - protein, 979 aa, synthetic construct
QEIGKRINKIRRRLVKDSNTKKAGKTGPMKTLLVRVMTPDLRERLENLRKKPENIPQPISNTSRANLNKLLTDYTEMKKAILHVYWEEFQKDPVGLMSRVAQPASKKIDQNKLKPEMDEKGNLTTAGFACSQCGQPLFVYKLEQVSEKGKAYTNYFGRCNVAEHEKLILLAQLKPEKDSDEAVTYSLGKFGQRALDFYSIHVTKESTHPVKPLAQIAGNRYASGPVGKALSDACMGTIASFLSKYQDIIIEHQKVVKGNQKRLESLRELAGKENLEYPSVTLPPQPHTKEGVDAYNEVIARVRMWVNLNLWQKLKLSRDDAKPLLRLKGFPSFPLVERQANEVDWWDMVCNVKKLINEKKEDGKVFWQNLAGYKRQEALRPYLSSEEDRKKGKKFARYQLGDLLLHLEKKHGEDWGKVYDEAWERIDKKVEGLSKHIKLEEERRSEDAQSKAALTDWLRAKASFVIEGLKEADKDEFCRCELKLQKWYGDLRGKPFAIEAENSILDISGFSKQYNCAFIWQKDGVKKLNLYLIINYFKGGKLRFKKIKPEAFEANRFYTVINKKSGEIVPMEVNFNFDDPNLIILPLAFGKRQGREFIWNDLLSLETGSLKLANGRVIEKTLYNRRTRQDEPALFVALTFERREVLDSSNIKPMNLIGVDRGENIPAVIALTDPEGCPLSRFKDSLGNPTHILRIGESYKEKQRTIQAKKEVEQRRAGGYSRKYASKAKNLADDMVRNTARDLLYYAVTQDAMLIFENLSRGFGRQGKRTFMAERQYTRMEDWLTAKLAYEGLPSKTYLSKTLAQYTSKTCSNCGFTITSADYDRVLEKLKKTATGWMTTINGKELKVEGQITYYNRYKRQNVVKDLSVELDRLSEESVNNDISSWTKGRQGEALSLLKKRFSHRPVQEKFVCLNCGFETHADEQAALNIARSWLFLRSQEYKKYQTNKTTGNTDKRAFVETWQSFYRKKLKEVWKPAV

SEQ ID NO: 14150 - protein, 978 aa, synthetic construct
QEIKRINGIRRRLVKDSNTKKAGKTGPMKTLLVRVMTPDLRERLENLRKKPENIPQPISNTSQANLNKLLTDYTEMKKAILHVYWEEFQKDPVGLMSRVAQPASKKIDQNKLKPEMDEKGNLTTAGFACSQCGQPLFVYKLEQVSEKGKAYTNYFGRCNVAEHEKLILLAQLKPEKDSDEAVTYSLGKFGQRALDFYSIHVTKESTHPVKPLAQIAGNRYASGPVGKALSDACMGTIASFLSKYQDIIIEHQKVVKGNQKRLESLRELAGKENLEYPSVTLPPQPHTKEGVDAYNEVIARVRMWVNLNLWQKLKLSRDDAKPLLRLKGFPSFPLVERQANEVDWWDMVCNVKKLINEKKEDGKVFWQNLAGYKRQEALRPYLSSEEDRKKGKKFARYQLGDLLLHLEKKHGEDWGKVYDEAWERIDKKVEGLSKHIKLEEERRSEDAQSKAALTDWLRAKASFVIEGLKEADKDEFCRCELKLQKWYGDLRGKPFAIEAENSILDISGFSKQYNCAFIWQKDGVKKLNLYLIINYFKGGKLRFKKIKPEAFEANRFYTVINKKSGEIVPMEVNFNFDDPNLIILPLAFGKRQGREFIWNDLLSLETGSLKLANGRVIEKTLYNRRTRQDEPALFVALTFERREVLDSSNIKPMNLIGVDRGENIPAVIALTDPEGCPLSRFKDSLGNPTHILRIGESYKEKQRTIQAKKEVEQRRAGGYSRKYASKAKNLADDMVRNTARDLLYYAVTQDAMLIFENLSRGFGRQGKRTFMAERQYTRMEDWLTAKLAYEGLPSKTYLSKTLAQYTSKTCSNCGFTITSADYDRVLEKLKKTATGWMTTINGKELKVEGQITYYNRYKRQNVVKDLSVELDRLSEESVNNDISSWTKGRSGEALSLLKKRFSHRPVQEKFVCLNCGFETHADEQAALNIARSWLFLRSQEYKKYQTNKTTGNTDKRAFVETWQSFYRKKLKEVWKPAV

SEQ ID NO: 14151 - protein, 978 aa, synthetic construct
QEIKRINGIRRRLVKDSNTKKAGKTGPMKTLLVRVMTPDLRERLENLRKKPENIPQPISNTSRANLNKLLTDYTEMKKAILHVYWEEFQKDPVGLMSRVAQPASKKIDQNKLKPEMDEKGNLTTAGFACSQCGQPLFVYKLEQVSEKGKAYTNYFGRCNVAEHEKLIKLAQLKPEKDSDEAVTYSLGKFGQRALDFYSIHVTKESTHPVKPLAQIAGNRYASGPVGKALSDACMGTIASFLSKYQDIIIEHQKVVKGNQKRLESLRELAGKENLEYPSVTLPPQPHTKEGVDAYNEVIARVRMWVNLNLWQKLKLSRDDAKPLLRLKGFPSFPLVERQANEVDWWDMVCNVKKLINEKKEDGKVFWQNLAGYKRQEALRPYLSSEEDRKKGKKFARYQLGDLLLHLEKKHGEDWGKVYDEAWERIDKKVEGLSKHIKLEEERRSEDAQSKAALTDWLRAKASFVIEGLKEADKDEFCRCELKLQKWYGDLRGKPFAIEAENSILDISGFSKQYNCAFIWQKDGVKKLNLYLIINYFKGGKLRFKKIKPEAFEANRFYTVINKKSGEIVPMEVNFNFDDPNLIILPLAFGKRQGREFIWNDLLSLETGSLKLANGRVIEKTLYNRRTRQDEPALFVALTFERREVLDSSNIKPMNLIGVDRGENIPAVIALTDPEGCPLSRFKDSLGNPTHILRIGESYKEKQRTIQAKKEVEQRRAGGYSRKYASKAKNLADDMVRNTARDLLYYAVTQDAMLIFENLSRGFGRQGKRTFMAERQYTRMEDWLTAKLAYEGLPSKTYLSKTLAQYTSKTCSNCGFTITSADYDRVLEKLKKTATGWMTTINGKELKVEGQITYYNRYKRQNVVKDLSVELDRLSEESVNNDISSWTKGRSGEALSLLKKRFSHRPVQEKFVCLNCGFETHADEQAALNIARSWLFLRSQEYKKYQTNKTTGNTDKRAFVETWQSFYRKKLKEVWKPAV

SEQ ID NO: 14152 - protein, 978 aa, synthetic construct
QEIKRINGIRRRLVKDSNTKKAGKTGPMKTLLVRVMTPDLRERLENLRKKPENIPQPISNTSRANLNKLLTDYTEMKKAILHVYWEEFQKDPVGLMSRVAQPASKKIDQNKLKPEMDEKGNLTTAGFACSQCGQPLFVYKLEQVSEKGKAYTNYFGRCNVAEHEKLIQLAQLKPEKDSDEAVTYSLGKFGQRALDFYSIHVTKESTHPVKPLAQIAGNRYASGPVGKALSDACMGTIASFLSKYQDIIIEHQKVVKGNQKRLESLRELAGKENLEYPSVTLPPQPHTKEGVDAYNEVIARVRMWVNLNLWQKLKLSRDDAKPLLRLKGFPSFPLVERQANEVDWWDMVCNVKKLINEKKEDGKVFWQNLAGYKRQEALRPYLSSEEDRKKGKKFARYQLGDLLLHLEKKHGEDWGKVYDEAWERIDKKVEGLSKHIKLEEERRSEDAQSKAALTDWLRAKASFVIEGLKEADKDEFCRCELKLQKWYGDLRGKPFAIEAENSILDISGFSKQYNCAFIWQKDGVKKLNLYLIINYFKGGKLRFKKIKPEAFEANRFYTVINKKSGEIVPMEVNFNFDDPNLIILPLAFGKRQGREFIWNDLLSLETGSLKLANGRVIEKTLYNRRTRQDEPALFVALTFERREVLDSSNIKPMNLIGVDRGENIPAVIALTDPEGCPLSRFKDSLGNPTHILRIGESYKEKQRTIQAKKEVEQRRAGGYSRKYASKAKNLADDMVRNTARDLLYYAVTQDAMLIFENLSRGFGRQGKRTFMAERQYTRMEDWLTAKLAYEGLPSKTYLSKTLAQYTSKTCSNCGFTITSADYDRVLEKLKKTATGWMTTINGKELKVEGQITYYNRYKRQNVVKDLSVELDRLSEESVNNDISSWTKGRSGEALSLLKKRFSHRPVQEKFVCLNCGFETHADEQAALNIARSWLFLRSQEYKKYQTNKTTGNTDKRAFVETWQSFYRKKLKEVWKPAV

SEQ ID NO: 14153 - protein, 978 aa, synthetic construct
QEIKRINGIRRRLVKDSNTKKAGKTGPMKTLLVRVMTPDLRERLENLRKKPENIPQPISNTSRANLNKLLTDYTEMKKAILHVYWEEFQKDPVGLMSRVAQPASKKIDQNKLKPEMDEKGNLTTAGFACSQCGQPLFVYKLEQVSEKGKAYTNYFGRCNVAEHEKLILLDQLKPEKDSDEAVTYSLGKFGQRALDFYSIHVTKESTHPVKPLAQIAGNRYASGPVGKALSDACMGTIASFLSKYQDIIIEHQKVVKGNQKRLESLRELAGKENLEYPSVTLPPQPHTKEGVDAYNEVIARVRMWVNLNLWQKLKLSRDDAKPLLRLKGFPSFPLVERQANEVDWWDMVCNVKKLINEKKEDGKVFWQNLAGYKRQEALRPYLSSEEDRKKGKKFARYQLGDLLLHLEKKHGEDWGKVYDEAWERIDKKVEGLSKHIKLEEERRSEDAQSKAALTDWLRAKASFVIEGLKEADKDEFCRCELKLQKWYGDLRGKPFAIEAENSILDISGFSKQYNCAFIWQKDGVKKLNLYLIINYFKGGKLRFKKIKPEAFEANRFYTVINKKSGEIVPMEVNFNFDDPNLIILPLAFGKRQGREFIWNDLLSLETGSLKLANGRVIEKTLYNRRTRQDEPALFVALTFERREVLDSSNIKPMNLIGVDRGENIPAVIALTDPEGCPLSRFKDSLGNPTHILRIGESYKEKQRTIQAKKEVEQRRAGGYSRKYASKAKNLADDMVRNTARDLLYYAVTQDAMLIFENLSRGFGRQGKRTFMAERQYTRMEDWLTAKLAYEGLPSKTYLSKTLAQYTSKTCSNCGFTITSADYDRVLEKLKKTATGWMTTINGKELKVEGQITYYNRYKRQNVVKDLSVELDRLSEESVNNDISSWTKGRSGEALSLLKKRFSHRPVQEKFVCLNCGFETHADEQAALNIARSWLFLRSQEYKKYQTNKTTGNTDKRAFVETWQSFYRKKLKEVWKPAV

SEQ ID NO: 14154 - protein, 978 aa, synthetic construct
QEIKRINGIRRRLVKDSNTKKAGKTGPMKTLLVRVMTPDLRERLENLRKKPENIPQPISNTSRANLNKLLTDYTEMKKAILHVYWEEFQKDPVGLMSRVAQPASKKIDQNKLKPEMDEKGNLTTAGFACSQCGQPLFVYKLEQVSEKGKAYTNYFGRCNVAEHEKLILLYQLKPEKDSDEAVTYSLGKFGQRALDFYSIHVTKESTHPVKPLAQIAGNRYASGPVGKALSDACMGTIASFLSKYQDIIIEHQKVVKGNQKRLESLRELAGKENLEYPSVTLPPQPHTKEGVDAYNEVIARVRMWVNLNLWQKLKLSRDDAKPLLRLKGFPSFPLVERQANEVDWWDMVCNVKKLINEKKEDGKVFWQNLAGYKRQEALRPYLSSEEDRKKGKKFARYQLGDLLLHLEKKHGEDWGKVYDEAWERIDKKVEGLSKHIKLEEERRSEDAQSKAALTDWLRAKASFVIEGLKEADKDEFCRCELKLQKWYGDLRGKPFAIEAENSILDISGFSKQYNCAFIWQKDGVKKLNLYLIINYFKGGKLRFKKIKPEAFEANRFYTVINKKSGEIVPMEVNFNFDDPNLIILPLAFGKRQGREFIWNDLLSLETGSLKLANGRVIEKTLYNRRTRQDEPALFVALTFERREVLDSSNIKPMNLIGVDRGENIPAVIALTDPEGCPLSRFKDSLGNPTHILRIGESYKEKQRTIQAKKEVEQRRAGGYSRKYASKAKNLADDMVRNTARDLLYYAVTQDAMLIFENLSRGFGRQGKRTFMAERQYTRMEDWLTAKLAYEGLPSKTYLSKTLAQYTSKTCSNCGFTITSADYDRVLEKLKKTATGWMTTINGKELKVEGQITYYNRYKRQNVVKDLSVELDRLSEESVNNDISSWTKGRSGEALSLLKKRFSHRPVQEKFVCLNCGFETHADEQAALNIARSWLFLRSQEYKKYQTNKTTGNTDKRAFVETWQSFYRKKLKEVWKPAV

SEQ ID NO: 14155 - protein, 978 aa, synthetic construct
QEIKRINGIRRRLVKDSNTKKAGKTGPMKTLLVRVMTPDLRERLENLRKKPENIPQPISNTSRANLNKLLTDYTEMKKAILHVYWEEFQKDPVGLMSRVAQPASKKIDQNKLKPEMDEKGNLTTAGFACSQCGQPLFVYKLEQVSEKGKAYTNYFGRCNVAEHEKLILLSQLKPEKDSDEAVTYSLGKFGQRALDFYSIHVTKESTHPVKPLAQIAGNRYASGPVGKALSDACMGTIASFLSKYQDIIIEHQKVVKGNQKRLESLRELAGKENLEYPSVTLPPQPHTKEGVDAYNEVIARVRMWVNLNLWQKLKLSRDDAKPLLRLKGFPSFPLVERQANEVDWWDMVCNVKKLINEKKEDGKVFWQNLAGYKRQEALRPYLSSEEDRKKGKKFARYQLGDLLLHLEKKHGEDWGKVYDEAWERIDKKVEGLSKHIKLEEERRSEDAQSKAALTDWLRAKASFVIEGLKEADKDEFCRCELKLQKWYGDLRGKPFAIEAENSILDISGFSKQYNCAFIWQKDGVKKLNLYLIINYFKGGKLRFKKIKPEAFEANRFYTVINKKSGEIVPMEVNFNFDDPNLIILPLAFGKRQGREFIWNDLLSLETGSLKLANGRVIEKTLYNRRTRQDEPALFVALTFERREVLDSSNIKPMNLIGVDRGENIPAVIALTDPEGCPLSRFKDSLGNPTHILRIGESYKEKQRTIQAKKEVEQRRAGGYSRKYASKAKNLADDMVRNTARDLLYYAVTQDAMLIFENLSRGFGRQGKRTFMAERQYTRMEDWLTAKLAYEGLPSKTYLSKTLAQYTSKTCSNCGFTITSADYDRVLEKLKKTATGWMTTINGKELKVEGQITYYNRYKRQNVVKDLSVELDRLSEESVNNDISSWTKGRSGEALSLLKKRFSHRPVQEKFVCLNCGFETHADEQAALNIARSWLFLRSQEYKKYQTNKTTGNTDKRAFVETWQSFYRKKLKEVWKPAV

SEQ ID NO: 14156 - protein, 978 aa, synthetic construct
QEIKRINGIRRRLVKDSNTKKAGKTGPMKTLLVRVMTPDLRERLENLRKKPENIPQPISNTSRANLNKLLTDYTEMKKAILHVYWEEFQKDPVGLMSRVAQPASKKIDQNKLKPEMDEKGNLTTAGFACSQCGQPLFVYKLEQVSEKGKAYTNYFGRCNVAEHEKLILLAQLKPEKDSDEAVTYSLGKFGQRALDFYSIHVTKESTHPVKPLAQIAGNRYASTPVGKALSDACMGTIASFLSKYQDIIIEHQKVVKGNQKRLESLRELAGKENLEYPSVTLPPQPHTKEGVDAYNEVIARVRMWVNLNLWQKLKLSRDDAKPLLRLKGFPSFPLVERQANEVDWWDMVCNVKKLINEKKEDGKVFWQNLAGYKRQEALRPYLSSEEDRKKGKKFARYQLGDLLLHLEKKHGEDWGKVYDEAWERIDKKVEGLSKHIKLEEERRSEDAQSKAALTDWLRAKASFVIEGLKEADKDEFCRCELKLQKWYGDLRGKPFAIEAENSILDISGFSKQYNCAFIWQKDGVKKLNLYLIINYFKGGKLRFKKIKPEAFEANRFYTVINKKSGEIVPMEVNFNFDDPNLIILPLAFGKRQGREFIWNDLLSLETGSLKLANGRVIEKTLYNRRTRQDEPALFVALTFERREVLDSSNIKPMNLIGVDRGENIPAVIALTDPEGCPLSRFKDSLGNPTHILRIGESYKEKQRTIQAKKEVEQRRAGGYSRKYASKAKNLADDMVRNTARDLLYYAVTQDAMLIFENLSRGFGRQGKRTFMAERQYTRMEDWLTAKLAYEGLPSKTYLSKTLAQYTSKTCSNCGFTITSADYDRVLEKLKKTATGWMTTINGKELKVEGQITYYNRYKRQNVVKDLSVELDRLSEESVNNDISSWTKGRSGEALSLLKKRFSHRPVQEKFVCLNCGFETHADEQAALNIARSWLFLRSQEYKKYQTNKTTGNTDKRAFVETWQSFYRKKLKEVWKPAV

SEQ ID NO: 14157 - protein, 978 aa, synthetic construct
QEIKRINGIRRRLVKDSNTKKAGKTGPMKTLLVRVMTPDLRERLENLRKKPENIPQPISNTSRANLNKLLTDYTEMKKAILHVYWEEFQKDPVGLMSRVAQPASKKIDQNKLKPEMDEKGNLTTAGFACSQCGQPLFVYKLEQVSEKGKAYTNYFGRCNVAEHEKLILLAQLKPEKDSDEAVTYSLGKFGQRALDFYSIHVTKESTHPVKPLAQIAGNRYASGPVGKALSDACMGTIASFLSKYQDIIIEHQKVVKGNQKRLESLRELAGKENLEYPSVTLPPQPHTKEGVDAYNEVIARVRTWVNLNLWQKLKLSRDDAKPLLRLKGFPSFPLVERQANEVDWWDMVCNVKKLINEKKEDGKVFWQNLAGYKRQEALRPYLSSEEDRKKGKKFARYQLGDLLLHLEKKHGEDWGKVYDEAWERIDKKVEGLSKHIKLEEERRSEDAQSKAALTDWLRAKASFVIEGLKEADKDEFCRCELKLQKWYGDLRGKPFAIEAENSILDISGFSKQYNCAFIWQKDGVKKLNLYLIINYFKGGKLRFKKIKPEAFEANRFYTVINKKSGEIVPMEVNFNFDDPNLIILPLAFGKRQGREFIWNDLLSLETGSLKLANGRVIEKTLYNRRTRQDEPALFVALTFERREVLDSSNIKPMNLIGVDRGENIPAVIALTDPEGCPLSRFKDSLGNPTHILRIGESYKEKQRTIQAKKEVEQRRAGGYSRKYASKAKNLADDMVRNTARDLLYYAVTQDAMLIFENLSRGFGRQGKRTFMAERQYTRMEDWLTAKLAYEGLPSKTYLSKTLAQYTSKTCSNCGFTITSADYDRVLEKLKKTATGWMTTINGKELKVEGQITYYNRYKRQNVVKDLSVELDRLSEESVNNDISSWTKGRSGEALSLLKKRFSHRPVQEKFVCLNCGFETHADEQAALNIARSWLFLRSQEYKKYQTNKTTGNTDKRAFVETWQSFYRKKLKEVWKPAV

SEQ ID NO: 14158 - protein, 978 aa, synthetic construct
QEIKRINGIRRRLVKDSNTKKAGKTGPMKTLLVRVMTPDLRERLENLRKKPENIPQPISNTSRANLNKLLTDYTEMKKAILHVYWEEFQKDPVGLMSRVAQPASKKIDQNKLKPEMDEKGNLTTAGFACSQCGQPLFVYKLEQVSEKGKAYTNYFGRCNVAEHEKLILLAQLKPEKDSDEAVTYSLGKFGQRALDFYSIHVTKESTHPVKPLAQIAGNRYASGPVGKALSDACMGTIASFLSKYQDIIIEHQKVVKGNQKRLESLRELAGKENLEYPSVTLPPQPHTKEGVDAYNEVIARVRMWVNLNLWQKLKLSRDDAKPLLRLKGFPSFPLVERQANEVDWWDMVCNVKKLINEKKEDGKVFWQNLAGYKRQEALRPYLSSEEDRKKGKKFARTQLGDLLLHLEKKHGEDWGKVYDEAWERIDKKVEGLSKHIKLEEERRSEDAQSKAALTDWLRAKASFVIEGLKEADKDEFCRCELKLQKWYGDLRGKPFAIEAENSILDISGFSKQYNCAFIWQKDGVKKLNLYLIINYFKGGKLRFKKIKPEAFEANRFYTVINKKSGEIVPMEVNFNFDDPNLIILPLAFGKRQGREFIWNDLLSLETGSLKLANGRVIEKTLYNRRTRQDEPALFVALTFERREVLDSSNIKPMNLIGVDRGENIPAVIALTDPEGCPLSRFKDSLGNPTHILRIGESYKEKQRTIQAKKEVEQRRAGGYSRKYASKAKNLADDMVRNTARDLLYYAVTQDAMLIFENLSRGFGRQGKRTFMAERQYTRMEDWLTAKLAYEGLPSKTYLSKTLAQYTSKTCSNCGFTITSADYDRVLEKLKKTATGWMTTINGKELKVEGQITYYNRYKRQNVVKDLSVELDRLSEESVNNDISSWTKGRSGEALSLLKKRFSHRPVQEKFVCLNCGFETHADEQAALNIARSWLFLRSQEYKKYQTNKTTGNTDKRAFVETWQSFYRKKLKEVWKPAV

SEQ ID NO: 14159 - protein, 978 aa, synthetic construct
QEIKRINGIRRRLVKDSNTKKAGKTGPMKTLLVRVMTPDLRERLENLRKKPENIPQPISNTSRANLNKLLTDYTEMKKAILHVYWEEFQKDPVGLMSRVAQPASKKIDQNKLKPEMDEKGNLTTAGFACSQCGQPLFVYKLEQVSEKGKAYTNYFGRCNVAEHEKLILLAQLKPEKDSDEAVTYSLGKFGQRALDFYSIHVTKESTHPVKPLAQIAGNRYASGPVGKALSDACMGTIASFLSKYQDIIIEHQKVVKGNQKRLESLRELAGKENLEYPSVTLPPQPHTKEGVDAYNEVIARVRMWVNLNLWQKLKLSRDDAKPLLRLKGFPSFPLVERQANEVDWWDMVCNVKKLINEKKEDGKVFWQNLAGYKRQEALRPYLSSEEDRKKGKKFARYQLGDLLLHLEKKHGEDWGKVYDEAWERIDKKVEGLSKHIKLEEERRSEDAQSKAALTDWLRAKASFVIEGLKEADKDEFCRCELKLQKWYGDLRGKPFAIEAENSILDISGFSKQYNCAFIWQKDGVKKLNLYLIINYFKGGKLRFKKIKPEAFEANRFYTVINKKSGEIVPMEVNFNFDDPNLIILPLAFGKRQGREFIWNDLLSLETGSLKLANGRVIEKTLYNRRTRQDEPALFVALTFERREVLDSSNIKPMNLIGVDRGENIPAVIALTDPEGCPLSRFKDSLGNPTHILRIGESYKEKQRTIQAKKEVEQRRAGGYSRKYASKAKNLADDMVRNTARDLLYYAVTQDAMLIFENLSRGFGRQGKRTFMAERQYTRMEDWLTAKLAYEGLPSKTYLSKTLAQYTSKTCSNCGFTITSADYDRMLEKLKKTATGWMTTINGKELKVEGQITYYNRYKRQNVVKDLSVELDRLSEESVNNDISSWTKGRSGEALSLLKKRFSHRPVQEKFVCLNCGFETHADEQAALNIARSWLFLRSQEYKKYQTNKTTGNTDKRAFVETWQSFYRKKLKEVWKPAV

SEQ ID NO: 14160 - protein, 978 aa, synthetic construct
QEIKRINGIRRRLVKDSNTKKAGKTGPMKTLLVRVMTPDLRERLENLRKKPENIPQPISNTSRANLNKLLTDYTEMKKAILHVYWEEFQKDPVGLMSRVAQPASKKIDQNKLKPEMDEKGNLTTAGFACSQCGQPLFVYKLEQVSEKGKAYTNYFGRCNVAEHEKLILLAQLKPEKDSDEAVTYSLGKFGQRALDFYSIHVTKESTHPVKPLAQIAGNRYASGPVGKALSDACMGTIASFLSKYQDIIIEHQKVVKGNQKRLESLRELAGKENLEYPSVTLPPQPHTKEGVDAYNEVIARVRMWVNLNLWQKLKLSRDDAKPLLRLKGFPSFPLVERQANEVDWWDMVCNVKKLINEKKEDGKVFWQNLAGYKRQEALRPYLSSEEDRKKGKKFARYQLGDLLLHLEKKHGEDWGKVYDEAWERIDKKVEGLSKHIKLEEERRSEDAQSKAALTDWLRAKASFVIEGLKEADKDEFCRCELKLQKWYGDLRGKPFAIEAENSILDISGFSKQYNCAFIWQKDGVKKLNLYLIINYFKGGKLRFKKIKPEAFEANRFYTVINKKSGEIVPMEVNFNFDDPNLIILPLAFGKRQGREFIWNDLLSLETGSLKLANGRVIEKTLYNRRTRQDEPALFVALTFERREVLDSSNIKPMNLIGVDRGENIPAVIALTDPEGCPLSRFKDSLGNPTHILRIGESYKEKQRTIQAKKEVEQRRAGGYSRKYASKAKNLADDMVRNTARDLLYYAVTQDAMLIFENLSRGFGRQGKRTFMAERQYTRMEDWLTAKLAYEGLPSKTYLSKTLAQYTSKTCSNCGFTITSADYDRVLEKLKKTATGWMTTINGKELKVEGQITYYNRYKRQNVVKDLSVELDRLSEESVNNDISSWDKGRSGEALSLLKKRFSHRPVQEKFVCLNCGFETHADEQAALNIARSWLFLRSQEYKKYQTNKTTGNTDKRAFVETWQSFYRKKLKEVWKPAV

SEQ ID NO: 14161 - protein, 978 aa, synthetic construct
QEIKRINGIRRRLVKDSNTKKAGKTGPMKTLLVRVMTPDLRERLENLRKKPENIPQPISNTSRANLNKLLTDYTEMKKAILHVYWEEFQKDPVGLMSRVAQPASKKIDQNKLKPEMDEKGNLTTAGFACSQCGQPLFVYKLEQVSEKGKAYTNYFGRCNVAEHEKLILLAQLKPEKDSDEAVTYSLGKFGQRALDFYSIHVTKESTHPVKPLAQIAGNRYASGPVGKALSDACMGTIASFLSKYQDIIIEHQKVVKGNQKRLESLRELAGKENLEYPSVTLPPQPHTKEGVDAYNEVIARVRMWVNLNLWQKLKLSRDDAKPLLRLKGFPSFPLVERQANEVDWWDMVCNVKKLINEKKEDGKVFWQNLAGYKRQEALRPYLSSEEDRKKGKKFARYQLGDLLLHLEKKHGEDWGKVYDEAWERIDKKVEGLSKHIKLEEERRSEDAQSKAALTDWLRAKASFVIEGLKEADKDEFCRCELKLQKWYGDLRGKPFAIEAENSILDISGFSKQYNCAFIWQKDGVKKLNLYLIINYFKGGKLRFKKIKPEAFEANRFYTVINKKSGEIVPMEVNFNFDDPNLIILPLAFGKRQGREFIWNDLLSLETGSLKLANGRVIEKTLYNRRTRQDEPALFVALTFERREVLDSSNIKPMNLIGVDRGENIPAVIALTDPEGCPLSRFKDSLGNPTHILRIGESYKEKQRTIQAKKEVEQRRAGGYSRKYASKAKNLADDMVRNTARDLLYYAVTQDAMLIFENLSRGFGRQGKRTFMAERQYTRMEDWLTAKLAYEGLPSKTYLSKTLAQYTSKTCSNCGFTITSADYDRVLEKLKKTATGWMTTINGKELKVEGQITYYNRYKRQNVVKDLSVELDRLSEESVNNDISSWTKGRQGEALSLLKKRFSHRPVQEKFVCLNCGFETHADEQAALNIARSWLFLRSQEYKKYQTNKTTGNTDKRAFVETWQSFYRKKLKEVWKPAV

SEQ ID NO: 14162 - protein, 979 aa, synthetic construct
QEIKRINKIRRRLVKDSNTKKAGKTRGPMKTLLVRVMTPDLRERLENLRKKPENIPQPISNTSQANLNKLLTDYTEMKKAILHVYWEEFQKDPVGLMSRVAQPASKKIDQNKLKPEMDEKGNLTTAGFACSQCGQPLFVYKLEQVSEKGKAYTNYFGRCNVAEHEKLILLAQLKPEKDSDEAVTYSLGKFGQRALDFYSIHVTKESTHPVKPLAQIAGNRYASGPVGKALSDACMGTIASFLSKYQDIIIEHQKVVKGNQKRLESLRELAGKENLEYPSVTLPPQPHTKEGVDAYNEVIARVRMWVNLNLWQKLKLSRDDAKPLLRLKGFPSFPLVERQANEVDWWDMVCNVKKLINEKKEDGKVFWQNLAGYKRQEALRPYLSSEEDRKKGKKFARYQLGDLLLHLEKKHGEDWGKVYDEAWERIDKKVEGLSKHIKLEEERRSEDAQSKAALTDWLRAKASFVIEGLKEADKDEFCRCELKLQKWYGDLRGKPFAIEAENSILDISGFSKQYNCAFIWQKDGVKKLNLYLIINYFKGGKLRFKKIKPEAFEANRFYTVINKKSGEIVPMEVNFNFDDPNLIILPLAFGKRQGREFIWNDLLSLETGSLKLANGRVIEKTLYNRRTRQDEPALFVALTFERREVLDSSNIKPMNLIGVDRGENIPAVIALTDPEGCPLSRFKDSLGNPTHILRIGESYKEKQRTIQAKKEVEQRRAGGYSRKYASKAKNLADDMVRNTARDLLYYAVTQDAMLIFENLSRGFGRQGKRTFMAERQYTRMEDWLTAKLAYEGLPSKTYLSKTLAQYTSKTCSNCGFTITSADYDRVLEKLKKTATGWMTTINGKELKVEGQITYYNRYKRQNVVKDLSVELDRLSEESVNNDISSWTKGRSGEALSLLKKRFSHRPVQEKFVCLNCGFETHADEQAALNIARSWLFLRSQEYKKYQTNKTTGNTDKRAFVETWQSFYRKKLKEVWKPAV

SEQ ID NO: 14163 - protein, 979 aa, synthetic construct; identical to SEQ ID NO: 298

SEQ ID NO: 14164 - protein, 979 aa, synthetic construct
QEIKRINKIRRRLVKDSNTKKAGKTRGPMKTLLVRVMTPDLRERLENLRKKPENIPQPISNTSRANLNKLLTDYTEMKKAILHVYWEEFQKDPVGLMSRVAQPASKKIDQNKLKPEMDEKGNLTTAGFACSQCGQPLFVYKLEQVSEKGKAYTNYFGRCNVAEHEKLIQLAQLKPEKDSDEAVTYSLGKFGQRALDFYSIHVTKESTHPVKPLAQIAGNRYASGPVGKALSDACMGTIASFLSKYQDIIIEHQKVVKGNQKRLESLRELAGKENLEYPSVTLPPQPHTKEGVDAYNEVIARVRMWVNLNLWQKLKLSRDDAKPLLRLKGFPSFPLVERQANEVDWWDMVCNVKKLINEKKEDGKVFWQNLAGYKRQEALRPYLSSEEDRKKGKKFARYQLGDLLLHLEKKHGEDWGKVYDEAWERIDKKVEGLSKHIKLEEERRSEDAQSKAALTDWLRAKASFVIEGLKEADKDEFCRCELKLQKWYGDLRGKPFAIEAENSILDISGFSKQYNCAFIWQKDGVKKLNLYLIINYFKGGKLRFKKIKPEAFEANRFYTVINKKSGEIVPMEVNFNFDDPNLIILPLAFGKRQGREFIWNDLLSLETGSLKLANGRVIEKTLYNRRTRQDEPALFVALTFERREVLDSSNIKPMNLIGVDRGENIPAVIALTDPEGCPLSRFKDSLGNPTHILRIGESYKEKQRTIQAKKEVEQRRAGGYSRKYASKAKNLADDMVRNTARDLLYYAVTQDAMLIFENLSRGFGRQGKRTFMAERQYTRMEDWLTAKLAYEGLPSKTYLSKTLAQYTSKTCSNCGFTITSADYDRVLEKLKKTATGWMTTINGKELKVEGQITYYNRYKRQNVVKDLSVELDRLSEESVNNDISSWTKGRSGEALSLLKKRFSHRPVQEKFVCLNCGFETHADEQAALNIARSWLFLRSQEYKKYQTNKTTGNTDKRAFVETWQSFYRKKLKEVWKPAV

SEQ ID NO: 14165 - protein, 979 aa, synthetic construct
QEIKRINKIRRRLVKDSNTKKAGKTRGPMKTLLVRVMTPDLRERLENLRKKPENIPQPISNTSRANLNKLLTDYTEMKKAILHVYWEEFQKDPVGLMSRVAQPASKKIDQNKLKPEMDEKGNLTTAGFACSQCGQPLFVYKLEQVSEKGKAYTNYFGRCNVAEHEKLILLDQLKPEKDSDEAVTYSLGKFGQRALDFYSIHVTKESTHPVKPLAQIAGNRYASGPVGKALSDACMGTIASFLSKYQDIIIEHQKVVKGNQKRLESLRELAGKENLEYPSVTLPPQPHTKEGVDAYNEVIARVRMWVNLNLWQKLKLSRDDAKPLLRLKGFPSFPLVERQANEVDWWDMVCNVKKLINEKKEDGKVFWQNLAGYKRQEALRPYLSSEEDRKKGKKFARYQLGDLLLHLEKKHGEDWGKVYDEAWERIDKKVEGLSKHIKLEEERRSEDAQSKAALTDWLRAKASFVIEGLKEADKDEFCRCELKLQKWYGDLRGKPFAIEAENSILDISGFSKQYNCAFIWQKDGVKKLNLYLIINYFKGGKLRFKKIKPEAFEANRFYTVINKKSGEIVPMEVNFNFDDPNLIILPLAFGKRQGREFIWNDLLSLETGSLKLANGRVIEKTLYNRRTRQDEPALFVALTFERREVLDSSNIKPMNLIGVDRGENIPAVIALTDPEGCPLSRFKDSLGNPTHILRIGESYKEKQRTIQAKKEVEQRRAGGYSRKYASKAKNLADDMVRNTARDLLYYAVTQDAMLIFENLSRGFGRQGKRTFMAERQYTRMEDWLTAKLAYEGLPSKTYLSKTLAQYTSKTCSNCGFTITSADYDRVLEKLKKTATGWMTTINGKELKVEGQITYYNRYKRQNVVKDLSVELDRLSEESVNNDISSWTKGRSGEALSLLKKRFSHRPVQEKFVCLNCGFETHADEQAALNIARSWLFLRSQEYKKYQTNKTTGNTDKRAFVETWQSFYRKKLKEVWKPAV

SEQ ID NO: 14166 - protein, 979 aa, synthetic construct
QEIKRINKIRRRLVKDSNTKKAGKTRGPMKTLLVRVMTPDLRERLENLRKKPENIPQPISNTSRANLNKLLTDYTEMKKAILHVYWEEFQKDPVGLMSRVAQPASKKIDQNKLKPEMDEKGNLTTAGFACSQCGQPLFVYKLEQVSEKGKAYTNYFGRCNVAEHEKLILLYQLKPEKDSDEAVTYSLGKFGQRALDFYSIHVTKESTHPVKPLAQIAGNRYASGPVGKALSDACMGTIASFLSKYQDIIIEHQKVVKGNQKRLESLRELAGKENLEYPSVTLPPQPHTKEGVDAYNEVIARVRMWVNLNLWQKLKLSRDDAKPLLRLKGFPSFPLVERQANEVDWWDMVCNVKKLINEKKEDGKVFWQNLAGYKRQEALRPYLSSEEDRKKGKKFARYQLGDLLLHLEKKHGEDWGKVYDEAWERIDKKVEGLSKHIKLEEERRSEDAQSKAALTDWLRAKASFVIEGLKEADKDEFCRCELKLQKWYGDLRGKPFAIEAENSILDISGFSKQYNCAFIWQKDGVKKLNLYLIINYFKGGKLRFKKIKPEAFEANRFYTVINKKSGEIVPMEVNFNFDDPNLIILPLAFGKRQGREFIWNDLLSLETGSLKLANGRVIEKTLYNRRTRQDEPALFVALTFERREVLDSSNIKPMNLIGVDRGENIPAVIALTDPEGCPLSRFKDSLGNPTHILRIGESYKEKQRTIQAKKEVEQRRAGGYSRKYASKAKNLADDMVRNTARDLLYYAVTQDAMLIFENLSRGFGRQGKRTFMAERQYTRMEDWLTAKLAYEGLPSKTYLSKTLAQYTSKTCSNCGFTITSADYDRVLEKLKKTATGWMTTINGKELKVEGQITYYNRYKRQNVVKDLSVELDRLSEESVNNDISSWTKGRSGEALSLLKKRFSHRPVQEKFVCLNCGFETHADEQAALNIARSWLFLRSQEYKKYQTNKTTGNTDKRAFVETWQSFYRKKLKEVWKPAV

SEQ ID NO: 14167 - protein, 979 aa, synthetic construct
QEIKRINKIRRRLVKDSNTKKAGKTRGPMKTLLVRVMTPDLRERLENLRKKPENIPQPISNTSRANLNKLLTDYTEMKKAILHVYWEEFQKDPVGLMSRVAQPASKKIDQNKLKPEMDEKGNLTTAGFACSQCGQPLFVYKLEQVSEKGKAYTNYFGRCNVAEHEKLILLSQLKPEKDSDEAVTYSLGKFGQRALDFYSIHVTKESTHPVKPLAQIAGNRYASGPVGKALSDACMGTIASFLSKYQDIIIEHQKVVKGNQKRLESLRELAGKENLEYPSVTLPPQPHTKEGVDAYNEVIARVRMWVNLNLWQKLKLSRDDAKPLLRLKGFPSFPLVERQANEVDWWDMVCNVKKLINEKKEDGKVFWQNLAGYKRQEALRPYLSSEEDRKKGKKFARYQLGDLLLHLEKKHGEDWGKVYDEAWERIDKKVEGLSKHIKLEEERRSEDAQSKAALTDWLRAKASFVIEGLKEADKDEFCRCELKLQKWYGDLRGKPFAIEAENSILDISGFSKQYNCAFIWQKDGVKKLNLYLIINYFKGGKLRFKKIKPEAFEANRFYTVINKKSGEIVPMEVNFNFDDPNLIILPLAFGKRQGREFIWNDLLSLETGSLKLANGRVIEKTLYNRRTRQDEPALFVALTFERREVLDSSNIKPMNLIGVDRGENIPAVIALTDPEGCPLSRFKDSLGNPTHILRIGESYKEKQRTIQAKKEVEQRRAGGYSRKYASKAKNLADDMVRNTARDLLYYAVTQDAMLIFENLSRGFGRQGKRTFMAERQYTRMEDWLTAKLAYEGLPSKTYLSKTLAQYTSKTCSNCGFTITSADYDRVLEKLKKTATGWMTTINGKELKVEGQITYYNRYKRQNVVKDLSVELDRLSEESVNNDISSWTKGRSGEALSLLKKRFSHRPVQEKFVCLNCGFETHADEQAALNIARSWLFLRSQEYKKYQTNKTTGNTDKRAFVETWQSFYRKKLKEVWKPAV

SEQ ID NO: 14168 - protein, 979 aa, synthetic construct
QEIKRINKIRRRLVKDSNTKKAGKTRGPMKTLLVRVMTPDLRERLENLRKKPENIPQPISNTSRANLNKLLTDYTEMKKAILHVYWEEFQKDPVGLMSRVAQPASKKIDQNKLKPEMDEKGNLTTAGFACSQCGQPLFVYKLEQVSEKGKAYTNYFGRCNVAEHEKLILLAQLKPEKDSDEAVTYSLGKFGQRALDFYSIHVTKESTHPVKPLAQIAGNRYASTPVGKALSDACMGTIASFLSKYQDIIIEHQKVVKGNQKRLESLRELAGKENLEYPSVTLPPQPHTKEGVDAYNEVIARVRMWVNLNLWQKLKLSRDDAKPLLRLKGFPSFPLVERQANEVDWWDMVCNVKKLINEKKEDGKVFWQNLAGYKRQEALRPYLSSEEDRKKGKKFARYQLGDLLLHLEKKHGEDWGKVYDEAWERIDKKVEGLSKHIKLEEERRSEDAQSKAALTDWLRAKASFVIEGLKEADKDEFCRCELKLQKWYGDLRGKPFAIEAENSILDISGFSKQYNCAFIWQKDGVKKLNLYLIINYFKGGKLRFKKIKPEAFEANRFYTVINKKSGEIVPMEVNFNFDDPNLIILPLAFGKRQGREFIWNDLLSLETGSLKLANGRVIEKTLYNRRTRQDEPALFVALTFERREVLDSSNIKPMNLIGVDRGENIPAVIALTDPEGCPLSRFKDSLGNPTHILRIGESYKEKQRTIQAKKEVEQRRAGGYSRKYASKAKNLADDMVRNTARDLLYYAVTQDAMLIFENLSRGFGRQGKRTFMAERQYTRMEDWLTAKLAYEGLPSKTYLSKTLAQYTSKTCSNCGFTITSADYDRVLEKLKKTATGWMTTINGKELKVEGQITYYNRYKRQNVVKDLSVELDRLSEESVNNDISSWTKGRSGEALSLLKKRFSHRPVQEKFVCLNCGFETHADEQAALNIARSWLFLRSQEYKKYQTNKTTGNTDKRAFVETWQSFYRKKLKEVWKPAV

SEQ ID NO: 14169 - protein, 979 aa, synthetic construct
QEIKRINKIRRRLVKDSNTKKAGKTRGPMKTLLVRVMTPDLRERLENLRKKPENIPQPISNTSRANLNKLLTDYTEMKKAILHVYWEEFQKDPVGLMSRVAQPASKKIDQNKLKPEMDEKGNLTTAGFACSQCGQPLFVYKLEQVSEKGKAYTNYFGRCNVAEHEKLILLAQLKPEKDSDEAVTYSLGKFGQRALDFYSIHVTKESTHPVKPLAQIAGNRYASGPVGKALSDACMGTIASFLSKYQDIIIEHQKVVKGNQKRLESLRELAGKENLEYPSVTLPPQPHTKEGVDAYNEVIARVRTWVNLNLWQKLKLSRDDAKPLLRLKGFPSFPLVERQANEVDWWDMVCNVKKLINEKKEDGKVFWQNLAGYKRQEALRPYLSSEEDRKKGKKFARYQLGDLLLHLEKKHGEDWGKVYDEAWERIDKKVEGLSKHIKLEEERRSEDAQSKAALTDWLRAKASFVIEGLKEADKDEFCRCELKLQKWYGDLRGKPFAIEAENSILDISGFSKQYNCAFIWQKDGVKKLNLYLIINYFKGGKLRFKKIKPEAFEANRFYTVINKKSGEIVPMEVNFNFDDPNLIILPLAFGKRQGREFIWNDLLSLETGSLKLANGRVIEKTLYNRRTRQDEPALFVALTFERREVLDSSNIKPMNLIGVDRGENIPAVIALTDPEGCPLSRFKDSLGNPTHILRIGESYKEKQRTIQAKKEVEQRRAGGYSRKYASKAKNLADDMVRNTARDLLYYAVTQDAMLIFENLSRGFGRQGKRTFMAERQYTRMEDWLTAKLAYEGLPSKTYLSKTLAQYTSKTCSNCGFTITSADYDRVLEKLKKTATGWMTTINGKELKVEGQITYYNRYKRQNVVKDLSVELDRLSEESVNNDISSWTKGRSGEALSLLKKRFSHRPVQEKFVCLNCGFETHADEQAALNIARSWLFLRSQEYKKYQTNKTTGNTDKRAFVETWQSFYRKKLKEVWKPAV

SEQ ID NO: 14170 - protein, 979 aa, synthetic construct
QEIKRINKIRRRLVKDSNTKKAGKTRGPMKTLLVRVMTPDLRERLENLRKKPENIPQPISNTSRANLNKLLTDYTEMKKAILHVYWEEFQKDPVGLMSRVAQPASKKIDQNKLKPEMDEKGNLTTAGFACSQCGQPLFVYKLEQVSEKGKAYTNYFGRCNVAEHEKLILLAQLKPEKDSDEAVTYSLGKFGQRALDFYSIHVTKESTHPVKPLAQIAGNRYASGPVGKALSDACMGTIASFLSKYQDIIIEHQKVVKGNQKRLESLRELAGKENLEYPSVTLPPQPHTKEGVDAYNEVIARVRMWVNLNLWQKLKLSRDDAKPLLRLKGFPSFPLVERQANEVDWWDMVCNVKKLINEKKEDGKVFWQNLAGYKRQEALRPYLSSEEDRKKGKKFARTQLGDLLLHLEKKHGEDWGKVYDEAWERIDKKVEGLSKHIKLEEERRSEDAQSKAALTDWLRAKASFVIEGLKEADKDEFCRCELKLQKWYGDLRGKPFAIEAENSILDISGFSKQYNCAFIWQKDGVKKLNLYLIINYFKGGKLRFKKIKPEAFEANRFYTVINKKSGEIVPMEVNFNFDDPNLIILPLAFGKRQGREFIWNDLLSLETGSLKLANGRVIEKTLYNRRTRQDEPALFVALTFERREVLDSSNIKPMNLIGVDRGENIPAVIALTDPEGCPLSRFKDSLGNPTHILRIGESYKEKQRTIQAKKEVEQRRAGGYSRKYASKAKNLADDMVRNTARDLLYYAVTQDAMLIFENLSRGFGRQGKRTFMAERQYTRMEDWLTAKLAYEGLPSKTYLSKTLAQYTSKTCSNCGFTITSADYDRVLEKLKKTATGWMTTINGKELKVEGQITYYNRYKRQNVVKDLSVELDRLSEESVNNDISSWTKGRSGEALSLLKKRFSHRPVQEKFVCLNCGFETHADEQAALNIARSWLFLRSQEYKKYQTNKTTGNTDKRAFVETWQSFYRKKLKEVWKPAV

SEQ ID NO: 14171 - protein, 979 aa, synthetic construct
QEIKRINKIRRRLVKDSNTKKAGKTRGPMKTLLVRVMTPDLRERLENLRKKPENIPQPISNTSRANLNKLLTDYTEMKKAILHVYWEEFQKDPVGLMSRVAQPASKKIDQNKLKPEMDEKGNLTTAGFACSQCGQPLFVYKLEQVSEKGKAYTNYFGRCNVAEHEKLILLAQLKPEKDSDEAVTYSLGKFGQRALDFYSIHVTKESTHPVKPLAQIAGNRYASGPVGKALSDACMGTIASFLSKYQDIIIEHQKVVKGNQKRLESLRELAGKENLEYPSVTLPPQPHTKEGVDAYNEVIARVRMWVNLNLWQKLKLSRDDAKPLLRLKGFPSFPLVERQANEVDWWDMVCNVKKLINEKKEDGKVFWQNLAGYKRQEALRPYLSSEEDRKKGKKFARYQLGDLLLHLEKKHGEDWGKVYDEAWERIDKKVEGLSKHIKLEEERRSEDAQSKAALTDWLRAKASFVIEGLKEADKDEFCRCELKLQKWYGDLRGKPFAIEAENSILDISGFSKQYNCAFIWQKDGVKKLNLYLIINYFKGGKLRFKKIKPEAFEANRFYTVINKKSGEIVPMEVNFNFDDPNLIILPLAFGKRQGREFIWNDLLSLETGSLKLANGRVIEKTLYNRRTRQDEPALFVALTFERREVLDSSNIKPMNLIGVDRGENIPAVIALTDPEGCPLSRFKDSLGNPTHILRIGESYKEKQRTIQAKKEVEQRRAGGYSRKYASKAKNLADDMVRNTARDLLYYAVTQDAMLIFENLSRGFGRQGKRTFMAERQYTRMEDWLTAKLAYEGLPSKTYLSKTLAQYTSKTCSNCGFTITSADYDRMLEKLKKTATGWMTTINGKELKVEGQITYYNRYKRQNVVKDLSVELDRLSEESVNNDISSWTKGRSGEALSLLKKRFSHRPVQEKFVCLNCGFETHADEQAALNIARSWLFLRSQEYKKYQTNKTTGNTDKRAFVETWQSFYRKKLKEVWKPAV

SEQ ID NO: 14172 - protein, 979 aa, synthetic construct
QEIKRINKIRRRLVKDSNTKKAGKTRGPMKTLLVRVMTPDLRERLENLRKKPENIPQPISNTSRANLNKLLTDYTEMKKAILHVYWEEFQKDPVGLMSRVAQPASKKIDQNKLKPEMDEKGNLTTAGFACSQCGQPLFVYKLEQVSEKGKAYTNYFGRCNVAEHEKLILLAQLKPEKDSDEAVTYSLGKFGQRALDFYSIHVTKESTHPVKPLAQIAGNRYASGPVGKALSDACMGTIASFLSKYQDIIIEHQKVVKGNQKRLESLRELAGKENLEYPSVTLPPQPHTKEGVDAYNEVIARVRMWVNLNLWQKLKLSRDDAKPLLRLKGFPSFPLVERQANEVDWWDMVCNVKKLINEKKEDGKVFWQNLAGYKRQEALRPYLSSEEDRKKGKKFARYQLGDLLLHLEKKHGEDWGKVYDEAWERIDKKVEGLSKHIKLEEERRSEDAQSKAALTDWLRAKASFVIEGLKEADKDEFCRCELKLQKWYGDLRGKPFAIEAENSILDISGFSKQYNCAFIWQKDGVKKLNLYLIINYFKGGKLRFKKIKPEAFEANRFYTVINKKSGEIVPMEVNFNFDDPNLIILPLAFGKRQGREFIWNDLLSLETGSLKLANGRVIEKTLYNRRTRQDEPALFVALTFERREVLDSSNIKPMNLIGVDRGENIPAVIALTDPEGCPLSRFKDSLGNPTHILRIGESYKEKQRTIQAKKEVEQRRAGGYSRKYASKAKNLADDMVRNTARDLLYYAVTQDAMLIFENLSRGFGRQGKRTFMAERQYTRMEDWLTAKLAYEGLPSKTYLSKTLAQYTSKTCSNCGFTITSADYDRVLEKLKKTATGWMTTINGKELKVEGQITYYNRYKRQNVVKDLSVELDRLSEESVNNDISSWDKGRSGEALSLLKKRFSHRPVQEKFVCLNCGFETHADEQAALNIARSWLFLRSQEYKKYQTNKTTGNTDKRAFVETWQSFYRKKLKEVWKPAV

SEQ ID NO: 14173 - protein, 979 aa, synthetic construct
QEIKRINKIRRRLVKDSNTKKAGKTRGPMKTLLVRVMTPDLRERLENLRKKPENIPQPISNTSRANLNKLLTDYTEMKKAILHVYWEEFQKDPVGLMSRVAQPASKKIDQNKLKPEMDEKGNLTTAGFACSQCGQPLFVYKLEQVSEKGKAYTNYFGRCNVAEHEKLILLAQLKPEKDSDEAVTYSLGKFGQRALDFYSIHVTKESTHPVKPLAQIAGNRYASGPVGKALSDACMGTIASFLSKYQDIIIEHQKVVKGNQKRLESLRELAGKENLEYPSVTLPPQPHTKEGVDAYNEVIARVRMWVNLNLWQKLKLSRDDAKPLLRLKGFPSFPLVERQANEVDWWDMVCNVKKLINEKKEDGKVFWQNLAGYKRQEALRPYLSSEEDRKKGKKFARYQLGDLLLHLEKKHGEDWGKVYDEAWERIDKKVEGLSKHIKLEEERRSEDAQSKAALTDWLRAKASFVIEGLKEADKDEFCRCELKLQKWYGDLRGKPFAIEAENSILDISGFSKQYNCAFIWQKDGVKKLNLYLIINYFKGGKLRFKKIKPEAFEANRFYTVINKKSGEIVPMEVNFNFDDPNLIILPLAFGKRQGREFIWNDLLSLETGSLKLANGRVIEKTLYNRRTRQDEPALFVALTFERREVLDSSNIKPMNLIGVDRGENIPAVIALTDPEGCPLSRFKDSLGNPTHILRIGESYKEKQRTIQAKKEVEQRRAGGYSRKYASKAKNLADDMVRNTARDLLYYAVTQDAMLIFENLSRGFGRQGKRTFMAERQYTRMEDWLTAKLAYEGLPSKTYLSKTLAQYTSKTCSNCGFTITSADYDRVLEKLKKTATGWMTTINGKELKVEGQITYYNRYKRQNVVKDLSVELDRLSEESVNNDISSWTKGRQGEALSLLKKRFSHRPVQEKFVCLNCGFETHADEQAALNIARSWLFLRSQEYKKYQTNKTTGNTDKRAFVETWQSFYRKKLKEVWKPAV

SEQ ID NO: 14174 - protein, 978 aa, synthetic construct
QEIKRINKIRRRLVKDSNTKKAGKTGPMKTLLVPVMTPDLRERLENLRKKPENIPQPISNTSQANLNKLLTDYTEMKKAILHVYWEEFQKDPVGLMSRVAQPASKKIDQNKLKPEMDEKGNLTTAGFACSQCGQPLFVYKLEQVSEKGKAYTNYFGRCNVAEHEKLILLAQLKPEKDSDEAVTYSLGKFGQRALDFYSIHVTKESTHPVKPLAQIAGNRYASGPVGKALSDACMGTIASFLSKYQDIIIEHQKVVKGNQKRLESLRELAGKENLEYPSVTLPPQPHTKEGVDAYNEVIARVRMWVNLNLWQKLKLSRDDAKPLLRLKGFPSFPLVERQANEVDWWDMVCNVKKLINEKKEDGKVFWQNLAGYKRQEALRPYLSSEEDRKKGKKFARYQLGDLLLHLEKKHGEDWGKVYDEAWERIDKKVEGLSKHIKLEEERRSEDAQSKAALTDWLRAKASFVIEGLKEADKDEFCRCELKLQKWYGDLRGKPFAIEAENSILDISGFSKQYNCAFIWQKDGVKKLNLYLIINYFKGGKLRFKKIKPEAFEANRFYTVINKKSGEIVPMEVNFNFDDPNLIILPLAFGKRQGREFIWNDLLSLETGSLKLANGRVIEKTLYNRRTRQDEPALFVALTFERREVLDSSNIKPMNLIGVDRGENIPAVIALTDPEGCPLSRFKDSLGNPTHILRIGESYKEKQRTIQAKKEVEQRRAGGYSRKYASKAKNLADDMVRNTARDLLYYAVTQDAMLIFENLSRGFGRQGKRTFMAERQYTRMEDWLTAKLAYEGLPSKTYLSKTLAQYTSKTCSNCGFTITSADYDRVLEKLKKTATGWMTTINGKELKVEGQITYYNRYKRQNVVKDLSVELDRLSEESVNNDISSWTKGRSGEALSLLKKRFSHRPVQEKFVCLNCGFETHADEQAALNIARSWLFLRSQEYKKYQTNKTTGNTDKRAFVETWQSFYRKKLKEVWKPAV

SEQ ID NO: 14175 - protein, 978 aa, synthetic construct
QEIKRINKIRRRLVKDSNTKKAGKTGPMKTLLVPVMTPDLRERLENLRKKPENIPQPISNTSRANLNKLLTDYTEMKKAILHVYWEEFQKDPVGLMSRVAQPASKKIDQNKLKPEMDEKGNLTTAGFACSQCGQPLFVYKLEQVSEKGKAYTNYFGRCNVAEHEKLIKLAQLKPEKDSDEAVTYSLGKFGQRALDFYSIHVTKESTHPVKPLAQIAGNRYASGPVGKALSDACMGTIASFLSKYQDIIIEHQKVVKGNQKRLESLRELAGKENLEYPSVTLPPQPHTKEGVDAYNEVIARVRMWVNLNLWQKLKLSRDDAKPLLRLKGFPSFPLVERQANEVDWWDMVCNVKKLINEKKEDGKVFWQNLAGYKRQEALRPYLSSEEDRKKGKKFARYQLGDLLLHLEKKHGEDWGKVYDEAWERIDKKVEGLSKHIKLEEERRSEDAQSKAALTDWLRAKASFVIEGLKEADKDEFCRCELKLQKWYGDLRGKPFAIEAENSILDISGFSKQYNCAFIWQKDGVKKLNLYLIINYFKGGKLRFKKIKPEAFEANRFYTVINKKSGEIVPMEVNFNFDDPNLIILPLAFGKRQGREFIWNDLLSLETGSLKLANGRVIEKTLYNRRTRQDEPALFVALTFERREVLDSSNIKPMNLIGVDRGENIPAVIALTDPEGCPLSRFKDSLGNPTHILRIGESYKEKQRTIQAKKEVEQRRAGGYSRKYASKAKNLADDMVRNTARDLLYYAVTQDAMLIFENLSRGFGRQGKRTFMAERQYTRMEDWLTAKLAYEGLPSKTYLSKTLAQYTSKTCSNCGFTITSADYDRVLEKLKKTATGWMTTINGKELKVEGQITYYNRYKRQNVVKDLSVELDRLSEESVNNDISSWTKGRSGEALSLLKKRFSHRPVQEKFVCLNCGFETHADEQAALNIARSWLFLRSQEYKKYQTNKTTGNTDKRAFVETWQSFYRKKLKEVWKPAV

SEQ ID NO: 14176 - protein, 978 aa, synthetic construct
QEIKRINKIRRRLVKDSNTKKAGKTGPMKTLLVPVMTPDLRERLENLRKKPENIPQPISNTSRANLNKLLTDYTEMKKAILHVYWEEFQKDPVGLMSRVAQPASKKIDQNKLKPEMDEKGNLTTAGFACSQCGQPLFVYKLEQVSEKGKAYTNYFGRCNVAEHEKLIQLAQLKPEKDSDEAVTYSLGKFGQRALDFYSIHVTKESTHPVKPLAQIAGNRYASGPVGKALSDACMGTIASFLSKYQDIIIEHQKVVKGNQKRLESLRELAGKENLEYPSVTLPPQPHTKEGVDAYNEVIARVRMWVNLNLWQKLKLSRDDAKPLLRLKGFPSFPLVERQANEVDWWDMVCNVKKLINEKKEDGKVFWQNLAGYKRQEALRPYLSSEEDRKKGKKFARYQLGDLLLHLEKKHGEDWGKVYDEAWERIDKKVEGLSKHIKLEEERRSEDAQSKAALTDWLRAKASFVIEGLKEADKDEFCRCELKLQKWYGDLRGKPFAIEAENSILDISGFSKQYNCAFIWQKDGVKKLNLYLIINYFKGGKLRFKKIKPEAFEANRFYTVINKKSGEIVPMEVNFNFDDPNLIILPLAFGKRQGREFIWNDLLSLETGSLKLANGRVIEKTLYNRRTRQDEPALFVALTFERREVLDSSNIKPMNLIGVDRGENIPAVIALTDPEGCPLSRFKDSLGNPTHILRIGESYKEKQRTIQAKKEVEQRRAGGYSRKYASKAKNLADDMVRNTARDLLYYAVTQDAMLIFENLSRGFGRQGKRTFMAERQYTRMEDWLTAKLAYEGLPSKTYLSKTLAQYTSKTCSNCGFTITSADYDRVLEKLKKTATGWMTTINGKELKVEGQITYYNRYKRQNVVKDLSVELDRLSEESVNNDISSWTKGRSGEALSLLKKRFSHRPVQEKFVCLNCGFETHADEQAALNIARSWLFLRSQEYKKYQTNKTTGNTDKRAFVETWQSFYRKKLKEVWKPAV

SEQ ID NO: 14177 - protein, 978 aa, synthetic construct
QEIKRINKIRRRLVKDSNTKKAGKTGPMKTLLVPVMTPDLRERLENLRKKPENIPQPISNTSRANLNKLLTDYTEMKKAILHVYWEEFQKDPVGLMSRVAQPASKKIDQNKLKPEMDEKGNLTTAGFACSQCGQPLFVYKLEQVSEKGKAYTNYFGRCNVAEHEKLILLDQLKPEKDSDEAVTYSLGKFGQRALDFYSIHVTKESTHPVKPLAQIAGNRYASGPVGKALSDACMGTIASFLSKYQDIIIEHQKVVKGNQKRLESLRELAGKENLEYPSVTLPPQPHTKEGVDAYNEVIARVRMWVNLNLWQKLKLSRDDAKPLLRLKGFPSFPLVERQANEVDWWDMVCNVKKLINEKKEDGKVFWQNLAGYKRQEALRPYLSSEEDRKKGKKFARYQLGDLLLHLEKKHGEDWGKVYDEAWERIDKKVEGLSKHIKLEEERRSEDAQSKAALTDWLRAKASFVIEGLKEADKDEFCRCELKLQKWYGDLRGKPFAIEAENSILDISGFSKQYNCAFIWQKDGVKKLNLYLIINYFKGGKLRFKKIKPEAFEANRFYTVINKKSGEIVPMEVNFNFDDPNLIILPLAFGKRQGREFIWNDLLSLETGSLKLANGRVIEKTLYNRRTRQDEPALFVALTFERREVLDSSNIKPMNLIGVDRGENIPAVIALTDPEGCPLSRFKDSLGNPTHILRIGESYKEKQRTIQAKKEVEQRRAGGYSRKYASKAKNLADDMVRNTARDLLYYAVTQDAMLIFENLSRGFGRQGKRTFMAERQYTRMEDWLTAKLAYEGLPSKTYLSKTLAQYTSKTCSNCGFTITSADYDRVLEKLKKTATGWMTTINGKELKVEGQITYYNRYKRQNVVKDLSVELDRLSEESVNNDISSWTKGRSGEALSLLKKRFSHRPVQEKFVCLNCGFETHADEQAALNIARSWLFLRSQEYKKYQTNKTTGNTDKRAFVETWQSFYRKKLKEVWKPAV

SEQ ID NO: 14178 - protein, 978 aa, synthetic construct
QEIKRINKIRRRLVKDSNTKKAGKTGPMKTLLVPVMTPDLRERLENLRKKPENIPQPISNTSRANLNKLLTDYTEMKKAILHVYWEEFQKDPVGLMSRVAQPASKKIDQNKLKPEMDEKGNLTTAGFACSQCGQPLFVYKLEQVSEKGKAYTNYFGRCNVAEHEKLILLYQLKPEKDSDEAVTYSLGKFGQRALDFYSIHVTKESTHPVKPLAQIAGNRYASGPVGKALSDACMGTIASFLSKYQDIIIEHQKVVKGNQKRLESLRELAGKENLEYPSVTLPPQPHTKEGVDAYNEVIARVRMWVNLNLWQKLKLSRDDAKPLLRLKGFPSFPLVERQANEVDWWDMVCNVKKLINEKKEDGKVFWQNLAGYKRQEALRPYLSSEEDRKKGKKFARYQLGDLLLHLEKKHGEDWGKVYDEAWERIDKKVEGLSKHIKLEEERRSEDAQSKAALTDWLRAKASFVIEGLKEADKDEFCRCELKLQKWYGDLRGKPFAIEAENSILDISGFSKQYNCAFIWQKDGVKKLNLYLIINYFKGGKLRFKKIKPEAFEANRFYTVINKKSGEIVPMEVNFNFDDPNLIILPLAFGKRQGREFIWNDLLSLETGSLKLANGRVIEKTLYNRRTRQDEPALFVALTFERREVLDSSNIKPMNLIGVDRGENIPAVIALTDPEGCPLSRFKDSLGNPTHILRIGESYKEKQRTIQAKKEVEQRRAGGYSRKYASKAKNLADDMVRNTARDLLYYAVTQDAMLIFENLSRGFGRQGKRTFMAERQYTRMEDWLTAKLAYEGLPSKTYLSKTLAQYTSKTCSNCGFTITSADYDRVLEKLKKTATGWMTTINGKELKVEGQITYYNRYKRQNVVKDLSVELDRLSEESVNNDISSWTKGRSGEALSLLKKRFSHRPVQEKFVCLNCGFETHADEQAALNIARSWLFLRSQEYKKYQTNKTTGNTDKRAFVETWQSFYRKKLKEVWKPAV

SEQ ID NO: 14179 - protein, 978 aa, synthetic construct
QEIKRINKIRRRLVKDSNTKKAGKTGPMKTLLVPVMTPDLRERLENLRKKPENIPQPISNTSRANLNKLLTDYTEMKKAILHVYWEEFQKDPVGLMSRVAQPASKKIDQNKLKPEMDEKGNLTTAGFACSQCGQPLFVYKLEQVSEKGKAYTNYFGRCNVAEHEKLILLSQLKPEKDSDEAVTYSLGKFGQRALDFYSIHVTKESTHPVKPLAQIAGNRYASGPVGKALSDACMGTIASFLSKYQDIIIEHQKVVKGNQKRLESLRELAGKENLEYPSVTLPPQPHTKEGVDAYNEVIARVRMWVNLNLWQKLKLSRDDAKPLLRLKGFPSFPLVERQANEVDWWDMVCNVKKLINEKKEDGKVFWQNLAGYKRQEALRPYLSSEEDRKKGKKFARYQLGDLLLHLEKKHGEDWGKVYDEAWERIDKKVEGLSKHIKLEEERRSEDAQSKAALTDWLRAKASFVIEGLKEADKDEFCRCELKLQKWYGDLRGKPFAIEAENSILDISGFSKQYNCAFIWQKDGVKKLNLYLIINYFKGGKLRFKKIKPEAFEANRFYTVINKKSGEIVPMEVNFNFDDPNLIILPLAFGKRQGREFIWNDLLSLETGSLKLANGRVIEKTLYNRRTRQDEPALFVALTFERREVLDSSNIKPMNLIGVDRGENIPAVIALTDPEGCPLSRFKDSLGNPTHILRIGESYKEKQRTIQAKKEVEQRRAGGYSRKYASKAKNLADDMVRNTARDLLYYAVTQDAMLIFENLSRGFGRQGKRTFMAERQYTRMEDWLTAKLAYEGLPSKTYLSKTLAQYTSKTCSNCGFTITSADYDRVLEKLKKTATGWMTTINGKELKVEGQITYYNRYKRQNVVKDLSVELDRLSEESVNNDISSWTKGRSGEALSLLKKRFSHRPVQEKFVCLNCGFETHADEQAALNIARSWLFLRSQEYKKYQTNKTTGNTDKRAFVETWQSFYRKKLKEVWKPAV

SEQ ID NO: 14180 - protein, 978 aa, synthetic construct
QEIKRINKIRRRLVKDSNTKKAGKTGPMKTLLVPVMTPDLRERLENLRKKPENIPQPISNTSRANLNKLLTDYTEMKKAILHVYWEEFQKDPVGLMSRVAQPASKKIDQNKLKPEMDEKGNLTTAGFACSQCGQPLFVYKLEQVSEKGKAYTNYFGRCNVAEHEKLILLAQLKPEKDSDEAVTYSLGKFGQRALDFYSIHVTKESTHPVKPLAQIAGNRYASTPVGKALSDACMGTIASFLSKYQDIIIEHQKVVKGNQKRLESLRELAGKENLEYPSVTLPPQPHTKEGVDAYNEVIARVRMWVNLNLWQKLKLSRDDAKPLLRLKGFPSFPLVERQANEVDWWDMVCNVKKLINEKKEDGKVFWQNLAGYKRQEALRPYLSSEEDRKKGKKFARYQLGDLLLHLEKKHGEDWGKVYDEAWERIDKKVEGLSKHIKLEEERRSEDAQSKAALTDWLRAKASFVIEGLKEADKDEFCRCELKLQKWYGDLRGKPFAIEAENSILDISGFSKQYNCAFIWQKDGVKKLNLYLIINYFKGGKLRFKKIKPEAFEANRFYTVINKKSGEIVPMEVNFNFDDPNLIILPLAFGKRQGREFIWNDLLSLETGSLKLANGRVIEKTLYNRRTRQDEPALFVALTFERREVLDSSNIKPMNLIGVDRGENIPAVIALTDPEGCPLSRFKDSLGNPTHILRIGESYKEKQRTIQAKKEVEQRRAGGYSRKYASKAKNLADDMVRNTARDLLYYAVTQDAMLIFENLSRGFGRQGKRTFMAERQYTRMEDWLTAKLAYEGLPSKTYLSKTLAQYTSKTCSNCGFTITSADYDRVLEKLKKTATGWMTTINGKELKVEGQITYYNRYKRQNVVKDLSVELDRLSEESVNNDISSWTKGRSGEALSLLKKRFSHRPVQEKFVCLNCGFETHADEQAALNIARSWLFLRSQEYKKYQTNKTTGNTDKRAFVETWQSFYRKKLKEVWKPAV

SEQ ID NO: 14181 - protein, 978 aa, synthetic construct
QEIKRINKIRRRLVKDSNTKKAGKTGPMKTLLVPVMTPDLRERLENLRKKPENIPQPISNTSRANLNKLLTDYTEMKKAILHVYWEEFQKDPVGLMSRVAQPASKKIDQNKLKPEMDEKGNLTTAGFACSQCGQPLFVYKLEQVSEKGKAYTNYFGRCNVAEHEKLILLAQLKPEKDSDEAVTYSLGKFGQRALDFYSIHVTKESTHPVKPLAQIAGNRYASGPVGKALSDACMGTIASFLSKYQDIIIEHQKVVKGNQKRLESLRELAGKENLEYPSVTLPPQPHTKEGVDAYNEVIARVRTWVNLNLWQKLKLSRDDAKPLLRLKGFPSFPLVERQANEVDWWDMVCNVKKLINEKKEDGKVFWQNLAGYKRQEALRPYLSSEEDRKKGKKFARYQLGDLLLHLEKKHGEDWGKVYDEAWERIDKKVEGLSKHIKLEEERRSEDAQSKAALTDWLRAKASFVIEGLKEADKDEFCRCELKLQKWYGDLRGKPFAIEAENSILDISGFSKQYNCAFIWQKDGVKKLNLYLIINYFKGGKLRFKKIKPEAFEANRFYTVINKKSGEIVPMEVNFNFDDPNLIILPLAFGKRQGREFIWNDLLSLETGSLKLANGRVIEKTLYNRRTRQDEPALFVALTFERREVLDSSNIKPMNLIGVDRGENIPAVIALTDPEGCPLSRFKDSLGNPTHILRIGESYKEKQRTIQAKKEVEQRRAGGYSRKYASKAKNLADDMVRNTARDLLYYAVTQDAMLIFENLSRGFGRQGKRTFMAERQYTRMEDWLTAKLAYEGLPSKTYLSKTLAQYTSKTCSNCGFTITSADYDRVLEKLKKTATGWMTTINGKELKVEGQITYYNRYKRQNVVKDLSVELDRLSEESVNNDISSWTKGRSGEALSLLKKRFSHRPVQEKFVCLNCGFETHADEQAALNIARSWLFLRSQEYKKYQTNKTTGNTDKRAFVETWQSFYRKKLKEVWKPAV

SEQ ID NO: 14182 - protein, 978 aa, synthetic construct
QEIKRINKIRRRLVKDSNTKKAGKTGPMKTLLVPVMTPDLRERLENLRKKPENIPQPISNTSRANLNKLLTDYTEMKKAILHVYWEEFQKDPVGLMSRVAQPASKKIDQNKLKPEMDEKGNLTTAGFACSQCGQPLFVYKLEQVSEKGKAYTNYFGRCNVAEHEKLILLAQLKPEKDSDEAVTYSLGKFGQRALDFYSIHVTKESTHPVKPLAQIAGNRYASGPVGKALSDACMGTIASFLSKYQDIIIEHQKVVKGNQKRLESLRELAGKENLEYPSVTLPPQPHTKEGVDAYNEVIARVRMWVNLNLWQKLKLSRDDAKPLLRLKGFPSFPLVERQANEVDWWDMVCNVKKLINEKKEDGKVFWQNLAGYKRQEALRPYLSSEEDRKKGKKFARTQLGDLLLHLEKKHGEDWGKVYDEAWERIDKKVEGLSKHIKLEEERRSEDAQSKAALTDWLRAKASFVIEGLKEADKDEFCRCELKLQKWYGDLRGKPFAIEAENSILDISGFSKQYNCAFIWQKDGVKKLNLYLIINYFKGGKLRFKKIKPEAFEANRFYTVINKKSGEIVPMEVNFNFDDPNLIILPLAFGKRQGREFIWNDLLSLETGSLKLANGRVIEKTLYNRRTRQDEPALFVALTFERREVLDSSNIKPMNLIGVDRGENIPAVIALTDPEGCPLSRFKDSLGNPTHILRIGESYKEKQRTIQAKKEVEQRRAGGYSRKYASKAKNLADDMVRNTARDLLYYAVTQDAMLIFENLSRGFGRQGKRTFMAERQYTRMEDWLTAKLAYEGLPSKTYLSKTLAQYTSKTCSNCGFTITSADYDRVLEKLKKTATGWMTTINGKELKVEGQITYYNRYKRQNVVKDLSVELDRLSEESVNNDISSWTKGRSGEALSLLKKRFSHRPVQEKFVCLNCGFETHADEQAALNIARSWLFLRSQEYKKYQTNKTTGNTDKRAFVETWQSFYRKKLKEVWKPAV

SEQ ID NO: 14183 - protein, 978 aa, synthetic construct
QEIKRINKIRRRLVKDSNTKKAGKTGPMKTLLVPVMTPDLRERLENLRKKPENIPQPISNTSRANLNKLLTDYTEMKKAILHVYWEEFQKDPVGLMSRVAQPASKKIDQNKLKPEMDEKGNLTTAGFACSQCGQPLFVYKLEQVSEKGKAYTNYFGRCNVAEHEKLILLAQLKPEKDSDEAVTYSLGKFGQRALDFYSIHVTKESTHPVKPLAQIAGNRYASGPVGKALSDACMGTIASFLSKYQDIIIEHQKVVKGNQKRLESLRELAGKENLEYPSVTLPPQPHTKEGVDAYNEVIARVRMWVNLNLWQKLKLSRDDAKPLLRLKGFPSFPLVERQANEVDWWDMVCNVKKLINEKKEDGKVFWQNLAGYKRQEALRPYLSSEEDRKKGKKFARYQLGDLLLHLEKKHGEDWGKVYDEAWERIDKKVEGLSKHIKLEEERRSEDAQSKAALTDWLRAKASFVIEGLKEADKDEFCRCELKLQKWYGDLRGKPFAIEAENSILDISGFSKQYNCAFIWQKDGVKKLNLYLIINYFKGGKLRFKKIKPEAFEANRFYTVINKKSGEIVPMEVNFNFDDPNLIILPLAFGKRQGREFIWNDLLSLETGSLKLANGRVIEKTLYNRRTRQDEPALFVALTFERREVLDSSNIKPMNLIGVDRGENIPAVIALTDPEGCPLSRFKDSLGNPTHILRIGESYKEKQRTIQAKKEVEQRRAGGYSRKYASKAKNLADDMVRNTARDLLYYAVTQDAMLIFENLSRGFGRQGKRTFMAERQYTRMEDWLTAKLAYEGLPSKTYLSKTLAQYTSKTCSNCGFTITSADYDRMLEKLKKTATGWMTTINGKELKVEGQITYYNRYKRQNVVKDLSVELDRLSEESVNNDISSWTKGRSGEALSLLKKRFSHRPVQEKFVCLNCGFETHADEQAALNIARSWLFLRSQEYKKYQTNKTTGNTDKRAFVETWQSFYRKKLKEVWKPAV

SEQ ID NO: 14184 - protein, 978 aa, synthetic construct
QEIKRINKIRRRLVKDSNTKKAGKTGPMKTLLVPVMTPDLRERLENLRKKPENIPQPISNTSRANLNKLLTDYTEMKKAILHVYWEEFQKDPVGLMSRVAQPASKKIDQNKLKPEMDEKGNLTTAGFACSQCGQPLFVYKLEQVSEKGKAYTNYFGRCNVAEHEKLILLAQLKPEKDSDEAVTYSLGKFGQRALDFYSIHVTKESTHPVKPLAQIAGNRYASGPVGKALSDACMGTIASFLSKYQDIIIEHQKVVKGNQKRLESLRELAGKENLEYPSVTLPPQPHTKEGVDAYNEVIARVRMWVNLNLWQKLKLSRDDAKPLLRLKGFPSFPLVERQANEVDWWDMVCNVKKLINEKKEDGKVFWQNLAGYKRQEALRPYLSSEEDRKKGKKFARYQLGDLLLHLEKKHGEDWGKVYDEAWERIDKKVEGLSKHIKLEEERRSEDAQSKAALTDWLRAKASFVIEGLKEADKDEFCRCELKLQKWYGDLRGKPFAIEAENSILDISGFSKQYNCAFIWQKDGVKKLNLYLIINYFKGGKLRFKKIKPEAFEANRFYTVINKKSGEIVPMEVNFNFDDPNLIILPLAFGKRQGREFIWNDLLSLETGSLKLANGRVIEKTLYNRRTRQDEPALFVALTFERREVLDSSNIKPMNLIGVDRGENIPAVIALTDPEGCPLSRFKDSLGNPTHILRIGESYKEKQRTIQAKKEVEQRRAGGYSRKYASKAKNLADDMVRNTARDLLYYAVTQDAMLIFENLSRGFGRQGKRTFMAERQYTRMEDWLTAKLAYEGLPSKTYLSKTLAQYTSKTCSNCGFTITSADYDRVLEKLKKTATGWMTTINGKELKVEGQITYYNRYKRQNVVKDLSVELDRLSEESVNNDISSWDKGRSGEALSLLKKRFSHRPVQEKFVCLNCGFETHADEQAALNIARSWLFLRSQEYKKYQTNKTTGNTDKRAFVETWQSFYRKKLKEVWKPAV

SEQ ID NO: 14185 - protein, 978 aa, synthetic construct
QEIKRINKIRRRLVKDSNTKKAGKTGPMKTLLVPVMTPDLRERLENLRKKPENIPQPISNTSRANLNKLLTDYTEMKKAILHVYWEEFQKDPVGLMSRVAQPASKKIDQNKLKPEMDEKGNLTTAGFACSQCGQPLFVYKLEQVSEKGKAYTNYFGRCNVAEHEKLILLAQLKPEKDSDEAVTYSLGKFGQRALDFYSIHVTKESTHPVKPLAQIAGNRYASGPVGKALSDACMGTIASFLSKYQDIIIEHQKVVKGNQKRLESLRELAGKENLEYPSVTLPPQPHTKEGVDAYNEVIARVRMWVNLNLWQKLKLSRDDAKPLLRLKGFPSFPLVERQANEVDWWDMVCNVKKLINEKKEDGKVFWQNLAGYKRQEALRPYLSSEEDRKKGKKFARYQLGDLLLHLEKKHGEDWGKVYDEAWERIDKKVEGLSKHIKLEEERRSEDAQSKAALTDWLRAKASFVIEGLKEADKDEFCRCELKLQKWYGDLRGKPFAIEAENSILDISGFSKQYNCAFIWQKDGVKKLNLYLIINYFKGGKLRFKKIKPEAFEANRFYTVINKKSGEIVPMEVNFNFDDPNLIILPLAFGKRQGREFIWNDLLSLETGSLKLANGRVIEKTLYNRRTRQDEPALFVALTFERREVLDSSNIKPMNLIGVDRGENIPAVIALTDPEGCPLSRFKDSLGNPTHILRIGESYKEKQRTIQAKKEVEQRRAGGYSRKYASKAKNLADDMVRNTARDLLYYAVTQDAMLIFENLSRGFGRQGKRTFMAERQYTRMEDWLTAKLAYEGLPSKTYLSKTLAQYTSKTCSNCGFTITSADYDRVLEKLKKTATGWMTTINGKELKVEGQITYYNRYKRQNVVKDLSVELDRLSEESVNNDISSWTKGRQGEALSLLKKRFSHRPVQEKFVCLNCGFETHADEQAALNIARSWLFLRSQEYKKYQTNKTTGNTDKRAFVETWQSFYRKKLKEVWKPAV

SEQ ID NO: 14186 - protein, 978 aa, synthetic construct
QEIKRINKIRRRLVKDSNTKKAGKTGPMKTLLVRVMTPDLRERLENLRKKPENIPQPISNTSRANLNKLLTDYTEMKKAILHVYWEEFQKDPVGLMSRVAQPASKKIDQNKLKPEMDEKGNLTTAGFACSQCGQPLFVYKLEQVSEKGKAYTNYFGRCNVAEHEKLILLAQLKPEKDSDEAVTYSLGKFGQRALDFYSIHVTKESTHPVKPLAQIAGNRYASGPVGKALSDACMGTIASFLSKYQDIIIEHQKVVKGNQKRLESLRELAGKENLEYPSVTLPPQPHTKEGVDAYNEVIARVRMWVNLNLWQKLKLSRDDAKPLLRLKGFPSFPLVERQANEVDWWDMVCNVKKLINEKKEDGKVFWQNLAGYKRQEALRPYLSSEEDRKKGKKFARYQLGDLLLHLEKKHGEDWGKVYDEAWERIDKKVEGLSKHIKLEEERRSEDAQSKAALTDWLRAKASFVIEGLKEADKDEFCRCELKLQKWYGDLRGKPFAIEAENSILDISGFSKQYNCAFIWQKDGVKKLNLYLIINYFKGGKLRFKKIKPEAFEANRFYTVINKKSGEIVPMEVNFNFDDPNLIILPLAFGKRQGREFIWNDLLSLETGSLKLANGRVIEKTLYNRRTRQDEPALFVALTFERREVLDSSNIKPMNLIGVDRGENIPAVIALTDPEGCPLSRFKDSLGNPTHILRIGESYKEKQRTIQAKKEVEQRRAGGYSRKYASKAKNLADDMVRNTARDLLYYAVTQDAMLIFENLSRGFGRQGKRTFMAERQYTRMEDWLTAKLAYEGLPSKTYLSKTLAQYTSKTCSNCGFTITSADYDRVLEKLKKTATGWMTTINGKELKVEGQITYYNRYKRQNVVKDLSVELDRLSEESVNNDISSWDKGRQGEALSLLKKRFSHRPVQEKFVCLNCGFETHADEQAALNIARSWLFLRSQEYKKYQTNKTTGNTDKRAFVETWQSFYRKKLKEVWKPAV

SEQ ID NO: 14187 - protein, 978 aa, synthetic construct
QEIKRINKIRRRLVKDSNTKKAGKTGPMKTLLVRVMTPDLRERLENLRKKPENIPQPISNTSQANLNKLLTDYTEMKKAILHVYWEEFQKDPVGLMSRVAQPASKKIDQNKLKPEMDEKGNLTTAGFACSQCGQPLFVYKLEQVSEKGKAYTNYFGRCNVAEHEKLIKLAQLKPEKDSDEAVTYSLGKFGQRALDFYSIHVTKESTHPVKPLAQIAGNRYASGPVGKALSDACMGTIASFLSKYQDIIIEHQKVVKGNQKRLESLRELAGKENLEYPSVTLPPQPHTKEGVDAYNEVIARVRMWVNLNLWQKLKLSRDDAKPLLRLKGFPSFPLVERQANEVDWWDMVCNVKKLINEKKEDGKVFWQNLAGYKRQEALRPYLSSEEDRKKGKKFARYQLGDLLLHLEKKHGEDWGKVYDEAWERIDKKVEGLSKHIKLEEERRSEDAQSKAALTDWLRAKASFVIEGLKEADKDEFCRCELKLQKWYGDLRGKPFAIEAENSILDISGFSKQYNCAFIWQKDGVKKLNLYLIINYFKGGKLRFKKIKPEAFEANRFYTVINKKSGEIVPMEVNFNFDDPNLIILPLAFGKRQGREFIWNDLLSLETGSLKLANGRVIEKTLYNRRTRQDEPALFVALTFERREVLDSSNIKPMNLIGVDRGENIPAVIALTDPEGCPLSRFKDSLGNPTHILRIGESYKEKQRTIQAKKEVEQRRAGGYSRKYASKAKNLADDMVRNTARDLLYYAVTQDAMLIFENLSRGFGRQGKRTFMAERQYTRMEDWLTAKLAYEGLPSKTYLSKTLAQYTSKTCSNCGFTITSADYDRVLEKLKKTATGWMTTINGKELKVEGQITYYNRYKRQNVVKDLSVELDRLSEESVNNDISSWTKGRSGEALSLLKKRFSHRPVQEKFVCLNCGFETHADEQAALNIARSWLFLRSQEYKKYQTNKTTGNTDKRAFVETWQSFYRKKLKEVWKPAV

SEQ ID NO: 14188 - protein, 978 aa, synthetic construct
QEIKRINKIRRRLVKDSNTKKAGKTGPMKTLLVRVMTPDLRERLENLRKKPENIPQPISNTSQANLNKLLTDYTEMKKAILHVYWEEFQKDPVGLMSRVAQPASKKIDQNKLKPEMDEKGNLTTAGFACSQCGQPLFVYKLEQVSEKGKAYTNYFGRCNVAEHEKLIQLAQLKPEKDSDEAVTYSLGKFGQRALDFYSIHVTKESTHPVKPLAQIAGNRYASGPVGKALSDACMGTIASFLSKYQDIIIEHQKVVKGNQKRLESLRELAGKENLEYPSVTLPPQPHTKEGVDAYNEVIARVRMWVNLNLWQKLKLSRDDAKPLLRLKGFPSFPLVERQANEVDWWDMVCNVKKLINEKKEDGKVFWQNLAGYKRQEALRPYLSSEEDRKKGKKFARYQLGDLLLHLEKKHGEDWGKVYDEAWERIDKKVEGLSKHIKLEEERRSEDAQSKAALTDWLRAKASFVIEGLKEADKDEFCRCELKLQKWYGDLRGKPFAIEAENSILDISGFSKQYNCAFIWQKDGVKKLNLYLIINYFKGGKLRFKKIKPEAFEANRFYTVINKKSGEIVPMEVNFNFDDPNLIILPLAFGKRQGREFIWNDLLSLETGSLKLANGRVIEKTLYNRRTRQDEPALFVALTFERREVLDSSNIKPMNLIGVDRGENIPAVIALTDPEGCPLSRFKDSLGNPTHILRIGESYKEKQRTIQAKKEVEQRRAGGYSRKYASKAKNLADDMVRNTARDLLYYAVTQDAMLIFENLSRGFGRQGKRTFMAERQYTRMEDWLTAKLAYEGLPSKTYLSKTLAQYTSKTCSNCGFTITSADYDRVLEKLKKTATGWMTTINGKELKVEGQITYYNRYKRQNVVKDLSVELDRLSEESVNNDISSWTKGRSGEALSLLKKRFSHRPVQEKFVCLNCGFETHADEQAALNIARSWLFLRSQEYKKYQTNKTTGNTDKRAFVETWQSFYRKKLKEVWKPAV

SEQ ID NO: 14189 - protein, 978 aa, synthetic construct
QEIKRINKIRRRLVKDSNTKKAGKTGPMKTLLVRVMTPDLRERLENLRKKPENIPQPISNTSQANLNKLLTDYTEMKKAILHVYWEEFQKDPVGLMSRVAQPASKKIDQNKLKPEMDEKGNLTTAGFACSQCGQPLFVYKLEQVSEKGKAYTNYFGRCNVAEHEKLILLDQLKPEKDSDEAVTYSLGKFGQRALDFYSIHVTKESTHPVKPLAQIAGNRYASGPVGKALSDACMGTIASFLSKYQDIIIEHQKVVKGNQKRLESLRELAGKENLEYPSVTLPPQPHTKEGVDAYNEVIARVRMWVNLNLWQKLKLSRDDAKPLLRLKGFPSFPLVERQANEVDWWDMVCNVKKLINEKKEDGKVFWQNLAGYKRQEALRPYLSSEEDRKKGKKFARYQLGDLLLHLEKKHGEDWGKVYDEAWERIDKKVEGLSKHIKLEEERRSEDAQSKAALTDWLRAKASFVIEGLKEADKDEFCRCELKLQKWYGDLRGKPFAIEAENSILDISGFSKQYNCAFIWQKDGVKKLNLYLIINYFKGGKLRFKKIKPEAFEANRFYTVINKKSGEIVPMEVNFNFDDPNLIILPLAFGKRQGREFIWNDLLSLETGSLKLANGRVIEKTLYNRRTRQDEPALFVALTFERREVLDSSNIKPMNLIGVDRGENIPAVIALTDPEGCPLSRFKDSLGNPTHILRIGESYKEKQRTIQAKKEVEQRRAGGYSRKYASKAKNLADDMVRNTARDLLYYAVTQDAMLIFENLSRGFGRQGKRTFMAERQYTRMEDWLTAKLAYEGLPSKTYLSKTLAQYTSKTCSNCGFTITSADYDRVLEKLKKTATGWMTTINGKELKVEGQITYYNRYKRQNVVKDLSVELDRLSEESVNNDISSWTKGRSGEALSLLKKRFSHRPVQEKFVCLNCGFETHADEQAALNIARSWLFLRSQEYKKYQTNKTTGNTDKRAFVETWQSFYRKKLKEVWKPAV

SEQ ID NO: 14190 - protein, 978 aa, synthetic construct
QEIKRINKIRRRLVKDSNTKKAGKTGPMKTLLVRVMTPDLRERLENLRKKPENIPQPISNTSQANLNKLLTDYTEMKKAILHVYWEEFQKDPVGLMSRVAQPASKKIDQNKLKPEMDEKGNLTTAGFACSQCGQPLFVYKLEQVSEKGKAYTNYFGRCNVAEHEKLILLYQLKPEKDSDEAVTYSLGKFGQRALDFYSIHVTKESTHPVKPLAQIAGNRYASGPVGKALSDACMGTIASFLSKYQDIIIEHQKVVKGNQKRLESLRELAGKENLEYPSVTLPPQPHTKEGVDAYNEVIARVRMWVNLNLWQKLKLSRDDAKPLLRLKGFPSFPLVERQANEVDWWDMVCNVKKLINEKKEDGKVFWQNLAGYKRQEALRPYLSSEEDRKKGKKFARYQLGDLLLHLEKKHGEDWGKVYDEAWERIDKKVEGLSKHIKLEEERRSEDAQSKAALTDWLRAKASFVIEGLKEADKDEFCRCELKLQKWYGDLRGKPFAIEAENSILDISGFSKQYNCAFIWQKDGVKKLNLYLIINYFKGGKLRFKKIKPEAFEANRFYTVINKKSGEIVPMEVNFNFDDPNLIILPLAFGKRQGREFIWNDLLSLETGSLKLANGRVIEKTLYNRRTRQDEPALFVALTFERREVLDSSNIKPMNLIGVDRGENIPAVIALTDPEGCPLSRFKDSLGNPTHILRIGESYKEKQRTIQAKKEVEQRRAGGYSRKYASKAKNLADDMVRNTARDLLYYAVTQDAMLIFENLSRGFGRQGKRTFMAERQYTRMEDWLTAKLAYEGLPSKTYLSKTLAQYTSKTCSNCGFTITSADYDRVLEKLKKTATGWMTTINGKELKVEGQITYYNRYKRQNVVKDLSVELDRLSEESVNNDISSWTKGRSGEALSLLKKRFSHRPVQEKFVCLNCGFETHADEQAALNIARSWLFLRSQEYKKYQTNKTTGNTDKRAFVETWQSFYRKKLKEVWKPAV

SEQ ID NO: 14191 - protein, 978 aa, synthetic construct
QEIKRINKIRRRLVKDSNTKKAGKTGPMKTLLVRVMTPDLRERLENLRKKPENIPQPISNTSQANLNKLLTDYTEMKKAILHVYWEEFQKDPVGLMSRVAQPASKKIDQNKLKPEMDEKGNLTTAGFACSQCGQPLFVYKLEQVSEKGKAYTNYFGRCNVAEHEKLILLSQLKPEKDSDEAVTYSLGKFGQRALDFYSIHVTKESTHPVKPLAQIAGNRYASGPVGKALSDACMGTIASFLSKYQDIIIEHQKVVKGNQKRLESLRELAGKENLEYPSVTLPPQPHTKEGVDAYNEVIARVRMWVNLNLWQKLKLSRDDAKPLLRLKGFPSFPLVERQANEVDWWDMVCNVKKLINEKKEDGKVFWQNLAGYKRQEALRPYLSSEEDRKKGKKFARYQLGDLLLHLEKKHGEDWGKVYDEAWERIDKKVEGLSKHIKLEEERRSEDAQSKAALTDWLRAKASFVIEGLKEADKDEFCRCELKLQKWYGDLRGKPFAIEAENSILDISGFSKQYNCAFIWQKDGVKKLNLYLIINYFKGGKLRFKKIKPEAFEANRFYTVINKKSGEIVPMEVNFNFDDPNLIILPLAFGKRQGREFIWNDLLSLETGSLKLANGRVIEKTLYNRRTRQDEPALFVALTFERREVLDSSNIKPMNLIGVDRGENIPAVIALTDPEGCPLSRFKDSLGNPTHILRIGESYKEKQRTIQAKKEVEQRRAGGYSRKYASKAKNLADDMVRNTARDLLYYAVTQDAMLIFENLSRGFGRQGKRTFMAERQYTRMEDWLTAKLAYEGLPSKTYLSKTLAQYTSKTCSNCGFTITSADYDRVLEKLKKTATGWMTTINGKELKVEGQITYYNRYKRQNVVKDLSVELDRLSEESVNNDISSWTKGRSGEALSLLKKRFSHRPVQEKFVCLNCGFETHADEQAALNIARSWLFLRSQEYKKYQTNKTTGNTDKRAFVETWQSFYRKKLKEVWKPAV

SEQ ID NO: 14192 - protein, 978 aa, synthetic construct
QEIKRINKIRRRLVKDSNTKKAGKTGPMKTLLVRVMTPDLRERLENLRKKPENIPQPISNTSQANLNKLLTDYTEMKKAILHVYWEEFQKDPVGLMSRVAQPASKKIDQNKLKPEMDEKGNLTTAGFACSQCGQPLFVYKLEQVSEKGKAYTNYFGRCNVAEHEKLILLAQLKPEKDSDEAVTYSLGKFGQRALDFYSIHVTKESTHPVKPLAQIAGNRYASTPVGKALSDACMGTIASFLSKYQDIIIEHQKVVKGNQKRLESLRELAGKENLEYPSVTLPPQPHTKEGVDAYNEVIARVRMWVNLNLWQKLKLSRDDAKPLLRLKGFPSFPLVERQANEVDWWDMVCNVKKLINEKKEDGKVFWQNLAGYKRQEALRPYLSSEEDRKKGKKFARYQLGDLLLHLEKKHGEDWGKVYDEAWERIDKKVEGLSKHIKLEEERRSEDAQSKAALTDWLRAKASFVIEGLKEADKDEFCRCELKLQKWYGDLRGKPFAIEAENSILDISGFSKQYNCAFIWQKDGVKKLNLYLIINYFKGGKLRFKKIKPEAFEANRFYTVINKKSGEIVPMEVNFNFDDPNLIILPLAFGKRQGREFIWNDLLSLETGSLKLANGRVIEKTLYNRRTRQDEPALFVALTFERREVLDSSNIKPMNLIGVDRGENIPAVIALTDPEGCPLSRFKDSLGNPTHILRIGESYKEKQRTIQAKKEVEQRRAGGYSRKYASKAKNLADDMVRNTARDLLYYAVTQDAMLIFENLSRGFGRQGKRTFMAERQYTRMEDWLTAKLAYEGLPSKTYLSKTLAQYTSKTCSNCGFTITSADYDRVLEKLKKTATGWMTTINGKELKVEGQITYYNRYKRQNVVKDLSVELDRLSEESVNNDISSWTKGRSGEALSLLKKRFSHRPVQEKFVCLNCGFETHADEQAALNIARSWLFLRSQEYKKYQTNKTTGNTDKRAFVETWQSFYRKKLKEVWKPAV

SEQ ID NO: 14193 - protein, 978 aa, synthetic construct
QEIKRINKIRRRLVKDSNTKKAGKTGPMKTLLVRVMTPDLRERLENLRKKPENIPQPISNTSQANLNKLLTDYTEMKKAILHVYWEEFQKDPVGLMSRVAQPASKKIDQNKLKPEMDEKGNLTTAGFACSQCGQPLFVYKLEQVSEKGKAYTNYFGRCNVAEHEKLILLAQLKPEKDSDEAVTYSLGKFGQRALDFYSIHVTKESTHPVKPLAQIAGNRYASGPVGKALSDACMGTIASFLSKYQDIIIEHQKVVKGNQKRLESLRELAGKENLEYPSVTLPPQPHTKEGVDAYNEVIARVRTWVNLNLWQKLKLSRDDAKPLLRLKGFPSFPLVERQANEVDWWDMVCNVKKLINEKKEDGKVFWQNLAGYKRQEALRPYLSSEEDRKKGKKFARYQLGDLLLHLEKKHGEDWGKVYDEAWERIDKKVEGLSKHIKLEEERRSEDAQSKAALTDWLRAKASFVIEGLKEADKDEFCRCELKLQKWYGDLRGKPFAIEAENSILDISGFSKQYNCAFIWQKDGVKKLNLYLIINYFKGGKLRFKKIKPEAFEANRFYTVINKKSGEIVPMEVNFNFDDPNLIILPLAFGKRQGREFIWNDLLSLETGSLKLANGRVIEKTLYNRRTRQDEPALFVALTFERREVLDSSNIKPMNLIGVDRGENIPAVIALTDPEGCPLSRFKDSLGNPTHILRIGESYKEKQRTIQAKKEVEQRRAGGYSRKYASKAKNLADDMVRNTARDLLYYAVTQDAMLIFENLSRGFGRQGKRTFMAERQYTRMEDWLTAKLAYEGLPSKTYLSKTLAQYTSKTCSNCGFTITSADYDRVLEKLKKTATGWMTTINGKELKVEGQITYYNRYKRQNVVKDLSVELDRLSEESVNNDISSWTKGRSGEALSLLKKRFSHRPVQEKFVCLNCGFETHADEQAALNIARSWLFLRSQEYKKYQTNKTTGNTDKRAFVETWQSFYRKKLKEVWKPAV

SEQ ID NO: 14194 - protein, 978 aa, synthetic construct
QEIKRINKIRRRLVKDSNTKKAGKTGPMKTLLVRVMTPDLRERLENLRKKPENIPQPISNTSQANLNKLLTDYTEMKKAILHVYWEEFQKDPVGLMSRVAQPASKKIDQNKLKPEMDEKGNLTTAGFACSQCGQPLFVYKLEQVSEKGKAYTNYFGRCNVAEHEKLILLAQLKPEKDSDEAVTYSLGKFGQRALDFYSIHVTKESTHPVKPLAQIAGNRYASGPVGKALSDACMGTIASFLSKYQDIIIEHQKVVKGNQKRLESLRELAGKENLEYPSVTLPPQPHTKEGVDAYNEVIARVRMWVNLNLWQKLKLSRDDAKPLLRLKGFPSFPLVERQANEVDWWDMVCNVKKLINEKKEDGKVFWQNLAGYKRQEALRPYLSSEEDRKKGKKFARTQLGDLLLHLEKKHGEDWGKVYDEAWERIDKKVEGLSKHIKLEEERRSEDAQSKAALTDWLRAKASFVIEGLKEADKDEFCRCELKLQKWYGDLRGKPFAIEAENSILDISGFSKQYNCAFIWQKDGVKKLNLYLIINYFKGGKLRFKKIKPEAFEANRFYTVINKKSGEIVPMEVNFNFDDPNLIILPLAFGKRQGREFIWNDLLSLETGSLKLANGRVIEKTLYNRRTRQDEPALFVALTFERREVLDSSNIKPMNLIGVDRGENIPAVIALTDPEGCPLSRFKDSLGNPTHILRIGESYKEKQRTIQAKKEVEQRRAGGYSRKYASKAKNLADDMVRNTARDLLYYAVTQDAMLIFENLSRGFGRQGKRTFMAERQYTRMEDWLTAKLAYEGLPSKTYLSKTLAQYTSKTCSNCGFTITSADYDRVLEKLKKTATGWMTTINGKELKVEGQITYYNRYKRQNVVKDLSVELDRLSEESVNNDISSWTKGRSGEALSLLKKRFSHRPVQEKFVCLNCGFETHADEQAALNIARSWLFLRSQEYKKYQTNKTTGNTDKRAFVETWQSFYRKKLKEVWKPAV

SEQ ID NO: 14195 - protein, 978 aa, synthetic construct
QEIKRINKIRRRLVKDSNTKKAGKTGPMKTLLVRVMTPDLRERLENLRKKPENIPQPISNTSQANLNKLLTDYTEMKKAILHVYWEEFQKDPVGLMSRVAQPASKKIDQNKLKPEMDEKGNLTTAGFACSQCGQPLFVYKLEQVSEKGKAYTNYFGRCNVAEHEKLILLAQLKPEKDSDEAVTYSLGKFGQRALDFYSIHVTKESTHPVKPLAQIAGNRYASGPVGKALSDACMGTIASFLSKYQDIIIEHQKVVKGNQKRLESLRELAGKENLEYPSVTLPPQPHTKEGVDAYNEVIARVRMWVNLNLWQKLKLSRDDAKPLLRLKGFPSFPLVERQANEVDWWDMVCNVKKLINEKKEDGKVFWQNLAGYKRQEALRPYLSSEEDRKKGKKFARYQLGDLLLHLEKKHGEDWGKVYDEAWERIDKKVEGLSKHIKLEEERRSEDAQSKAALTDWLRAKASFVIEGLKEADKDEFCRCELKLQKWYGDLRGKPFAIEAENSILDISGFSKQYNCAFIWQKDGVKKLNLYLIINYFKGGKLRFKKIKPEAFEANRFYTVINKKSGEIVPMEVNFNFDDPNLIILPLAFGKRQGREFIWNDLLSLETGSLKLANGRVIEKTLYNRRTRQDEPALFVALTFERREVLDSSNIKPMNLIGVDRGENIPAVIALTDPEGCPLSRFKDSLGNPTHILRIGESYKEKQRTIQAKKEVEQRRAGGYSRKYASKAKNLADDMVRNTARDLLYYAVTQDAMLIFENLSRGFGRQGKRTFMAERQYTRMEDWLTAKLAYEGLPSKTYLSKTLAQYTSKTCSNCGFTITSADYDRMLEKLKKTATGWMTTINGKELKVEGQITYYNRYKRQNVVKDLSVELDRLSEESVNNDISSWTKGRSGEALSLLKKRFSHRPVQEKFVCLNCGFETHADEQAALNIARSWLFLRSQEYKKYQTNKTTGNTDKRAFVETWQSFYRKKLKEVWKPAV

SEQ ID NO: 14196 - protein, 978 aa, synthetic construct
QEIKRINKIRRRLVKDSNTKKAGKTGPMKTLLVRVMTPDLRERLENLRKKPENIPQPISNTSQANLNKLLTDYTEMKKAILHVYWEEFQKDPVGLMSRVAQPASKKIDQNKLKPEMDEKGNLTTAGFACSQCGQPLFVYKLEQVSEKGKAYTNYFGRCNVAEHEKLILLAQLKPEKDSDEAVTYSLGKFGQRALDFYSIHVTKESTHPVKPLAQIAGNRYASGPVGKALSDACMGTIASFLSKYQDIIIEHQKVVKGNQKRLESLRELAGKENLEYPSVTLPPQPHTKEGVDAYNEVIARVRMWVNLNLWQKLKLSRDDAKPLLRLKGFPSFPLVERQANEVDWWDMVCNVKKLINEKKEDGKVFWQNLAGYKRQEALRPYLSSEEDRKKGKKFARYQLGDLLLHLEKKHGEDWGKVYDEAWERIDKKVEGLSKHIKLEEERRSEDAQSKAALTDWLRAKASFVIEGLKEADKDEFCRCELKLQKWYGDLRGKPFAIEAENSILDISGFSKQYNCAFIWQKDGVKKLNLYLIINYFKGGKLRFKKIKPEAFEANRFYTVINKKSGEIVPMEVNFNFDDPNLIILPLAFGKRQGREFIWNDLLSLETGSLKLANGRVIEKTLYNRRTRQDEPALFVALTFERREVLDSSNIKPMNLIGVDRGENIPAVIALTDPEGCPLSRFKDSLGNPTHILRIGESYKEKQRTIQAKKEVEQRRAGGYSRKYASKAKNLADDMVRNTARDLLYYAVTQDAMLIFENLSRGFGRQGKRTFMAERQYTRMEDWLTAKLAYEGLPSKTYLSKTLAQYTSKTCSNCGFTITSADYDRVLEKLKKTATGWMTTINGKELKVEGQITYYNRYKRQNVVKDLSVELDRLSEESVNNDISSWDKGRSGEALSLLKKRFSHRPVQEKFVCLNCGFETHADEQAALNIARSWLFLRSQEYKKYQTNKTTGNTDKRAFVETWQSFYRKKLKEVWKPAV

SEQ ID NO: 14197 - protein, 978 aa, synthetic construct
QEIKRINKIRRRLVKDSNTKKAGKTGPMKTLLVRVMTPDLRERLENLRKKPENIPQPISNTSQANLNKLLTDYTEMKKAILHVYWEEFQKDPVGLMSRVAQPASKKIDQNKLKPEMDEKGNLTTAGFACSQCGQPLFVYKLEQVSEKGKAYTNYFGRCNVAEHEKLILLAQLKPEKDSDEAVTYSLGKFGQRALDFYSIHVTKESTHPVKPLAQIAGNRYASGPVGKALSDACMGTIASFLSKYQDIIIEHQKVVKGNQKRLESLRELAGKENLEYPSVTLPPQPHTKEGVDAYNEVIARVRMWVNLNLWQKLKLSRDDAKPLLRLKGFPSFPLVERQANEVDWWDMVCNVKKLINEKKEDGKVFWQNLAGYKRQEALRPYLSSEEDRKKGKKFARYQLGDLLLHLEKKHGEDWGKVYDEAWERIDKKVEGLSKHIKLEEERRSEDAQSKAALTDWLRAKASFVIEGLKEADKDEFCRCELKLQKWYGDLRGKPFAIEAENSILDISGFSKQYNCAFIWQKDGVKKLNLYLIINYFKGGKLRFKKIKPEAFEANRFYTVINKKSGEIVPMEVNFNFDDPNLIILPLAFGKRQGREFIWNDLLSLETGSLKLANGRVIEKTLYNRRTRQDEPALFVALTFERREVLDSSNIKPMNLIGVDRGENIPAVIALTDPEGCPLSRFKDSLGNPTHILRIGESYKEKQRTIQAKKEVEQRRAGGYSRKYASKAKNLADDMVRNTARDLLYYAVTQDAMLIFENLSRGFGRQGKRTFMAERQYTRMEDWLTAKLAYEGLPSKTYLSKTLAQYTSKTCSNCGFTITSADYDRVLEKLKKTATGWMTTINGKELKVEGQITYYNRYKRQNVVKDLSVELDRLSEESVNNDISSWTKGRQGEALSLLKKRFSHRPVQEKFVCLNCGFETHADEQAALNIARSWLFLRSQEYKKYQTNKTTGNTDKRAFVETWQSFYRKKLKEVWKPAV

SEQ ID NO: 14198 - protein, 978 aa, synthetic construct
QEIKRINKIRRRLVKDSNTKKAGKTGPMKTLLVRVMTPDLRERLENLRKKPENIPQPISNTSRANLNKLLTDYTEMKKAILHVYWEEFQKDPVGLMSRVAQPASKKIDQNKLKPEMDEKGNLTTAGFACSQCGQPLFVYKLEQVSEKGKAYTNYFGRCNVAEHEKLIKLDQLKPEKDSDEAVTYSLGKFGQRALDFYSIHVTKESTHPVKPLAQIAGNRYASGPVGKALSDACMGTIASFLSKYQDIIIEHQKVVKGNQKRLESLRELAGKENLEYPSVTLPPQPHTKEGVDAYNEVIARVRMWVNLNLWQKLKLSRDDAKPLLRLKGFPSFPLVERQANEVDWWDMVCNVKKLINEKKEDGKVFWQNLAGYKRQEALRPYLSSEEDRKKGKKFARYQLGDLLLHLEKKHGEDWGKVYDEAWERIDKKVEGLSKHIKLEEERRSEDAQSKAALTDWLRAKASFVIEGLKEADKDEFCRCELKLQKWYGDLRGKPFAIEAENSILDISGFSKQYNCAFIWQKDGVKKLNLYLIINYFKGGKLRFKKIKPEAFEANRFYTVINKKSGEIVPMEVNFNFDDPNLIILPLAFGKRQGREFIWNDLLSLETGSLKLANGRVIEKTLYNRRTRQDEPALFVALTFERREVLDSSNIKPMNLIGVDRGENIPAVIALTDPEGCPLSRFKDSLGNPTHILRIGESYKEKQRTIQAKKEVEQRRAGGYSRKYASKAKNLADDMVRNTARDLLYYAVTQDAMLIFENLSRGFGRQGKRTFMAERQYTRMEDWLTAKLAYEGLPSKTYLSKTLAQYTSKTCSNCGFTITSADYDRVLEKLKKTATGWMTTINGKELKVEGQITYYNRYKRQNVVKDLSVELDRLSEESVNNDISSWTKGRSGEALSLLKKRFSHRPVQEKFVCLNCGFETHADEQAALNIARSWLFLRSQEYKKYQTNKTTGNTDKRAFVETWQSFYRKKLKEVWKPAV

SEQ ID NO: 14199 - protein, 978 aa, synthetic construct
QEIKRINKIRRRLVKDSNTKKAGKTGPMKTLLVRVMTPDLRERLENLRKKPENIPQPISNTSRANLNKLLTDYTEMKKAILHVYWEEFQKDPVGLMSRVAQPASKKIDQNKLKPEMDEKGNLTTAGFACSQCGQPLFVYKLEQVSEKGKAYTNYFGRCNVAEHEKLIKLYQLKPEKDSDEAVTYSLGKFGQRALDFYSIHVTKESTHPVKPLAQIAGNRYASGPVGKALSDACMGTIASFLSKYQDIIIEHQKVVKGNQKRLESLRELAGKENLEYPSVTLPPQPHTKEGVDAYNEVIARVRMWVNLNLWQKLKLSRDDAKPLLRLKGFPSFPLVERQANEVDWWDMVCNVKKLINEKKEDGKVFWQNLAGYKRQEALRPYLSSEEDRKKGKKFARYQLGDLLLHLEKKHGEDWGKVYDEAWERIDKKVEGLSKHIKLEEERRSEDAQSKAALTDWLRAKASFVIEGLKEADKDEFCRCELKLQKWYGDLRGKPFAIEAENSILDISGFSKQYNCAFIWQKDGVKKLNLYLIINYFKGGKLRFKKIKPEAFEANRFYTVINKKSGEIVPMEVNFNFDDPNLIILPLAFGKRQGREFIWNDLLSLETGSLKLANGRVIEKTLYNRRTRQDEPALFVALTFERREVLDSSNIKPMNLIGVDRGENIPAVIALTDPEGCPLSRFKDSLGNPTHILRIGESYKEKQRTIQAKKEVEQRRAGGYSRKYASKAKNLADDMVRNTARDLLYYAVTQDAMLIFENLSRGFGRQGKRTFMAERQYTRMEDWLTAKLAYEGLPSKTYLSKTLAQYTSKTCSNCGFTITSADYDRVLEKLKKTATGWMTTINGKELKVEGQITYYNRYKRQNVVKDLSVELDRLSEESVNNDISSWTKGRSGEALSLLKKRFSHRPVQEKFVCLNCGFETHADEQAALNIARSWLFLRSQEYKKYQTNKTTGNTDKRAFVETWQSFYRKKLKEVWKPAV

SEQ ID NO: 14200 - protein, 978 aa, synthetic construct
QEIKRINKIRRRLVKDSNTKKAGKTGPMKTLLVRVMTPDLRERLENLRKKPENIPQPISNTSRANLNKLLTDYTEMKKAILHVYWEEFQKDPVGLMSRVAQPASKKIDQNKLKPEMDEKGNLTTAGFACSQCGQPLFVYKLEQVSEKGKAYTNYFGRCNVAEHEKLIKLSQLKPEKDSDEAVTYSLGKFGQRALDFYSIHVTKESTHPVKPLAQIAGNRYASGPVGKALSDACMGTIASFLSKYQDIIIEHQKVVKGNQKRLESLRELAGKENLEYPSVTLPPQPHTKEGVDAYNEVIARVRMWVNLNLWQKLKLSRDDAKPLLRLKGFPSFPLVERQANEVDWWDMVCNVKKLINEKKEDGKVFWQNLAGYKRQEALRPYLSSEEDRKKGKKFARYQLGDLLLHLEKKHGEDWGKVYDEAWERIDKKVEGLSKHIKLEEERRSEDAQSKAALTDWLRAKASFVIEGLKEADKDEFCRCELKLQKWYGDLRGKPFAIEAENSILDISGFSKQYNCAFIWQKDGVKKLNLYLIINYFKGGKLRFKKIKPEAFEANRFYTVINKKSGEIVPMEVNFNFDDPNLIILPLAFGKRQGREFIWNDLLSLETGSLKLANGRVIEKTLYNRRTRQDEPALFVALTFERREVLDSSNIKPMNLIGVDRGENIPAVIALTDPEGCPLSRFKDSLGNPTHILRIGESYKEKQRTIQAKKEVEQRRAGGYSRKYASKAKNLADDMVRNTARDLLYYAVTQDAMLIFENLSRGFGRQGKRTFMAERQYTRMEDWLTAKLAYEGLPSKTYLSKTLAQYTSKTCSNCGFTITSADYDRVLEKLKKTATGWMTTINGKELKVEGQITYYNRYKRQNVVKDLSVELDRLSEESVNNDISSWTKGRSGEALSLLKKRFSHRPVQEKFVCLNCGFETHADEQAALNIARSWLFLRSQEYKKYQTNKTTGNTDKRAFVETWQSFYRKKLKEVWKPAV

SEQ ID NO: 14201 - protein, 978 aa, synthetic construct
QEIKRINKIRRRLVKDSNTKKAGKTGPMKTLLVRVMTPDLRERLENLRKKPENIPQPISNTSRANLNKLLTDYTEMKKAILHVYWEEFQKDPVGLMSRVAQPASKKIDQNKLKPEMDEKGNLTTAGFACSQCGQPLFVYKLEQVSEKGKAYTNYFGRCNVAEHEKLIKLAQLKPEKDSDEAVTYSLGKFGQRALDFYSIHVTKESTHPVKPLAQIAGNRYASTPVGKALSDACMGTIASFLSKYQDIIIEHQKVVKGNQKRLESLRELAGKENLEYPSVTLPPQPHTKEGVDAYNEVIARVRMWVNLNLWQKLKLSRDDAKPLLRLKGFPSFPLVERQANEVDWWDMVCNVKKLINEKKEDGKVFWQNLAGYKRQEALRPYLSSEEDRKKGKKFARYQLGDLLLHLEKKHGEDWGKVYDEAWERIDKKVEGLSKHIKLEEERRSEDAQSKAALTDWLRAKASFVIEGLKEADKDEFCRCELKLQKWYGDLRGKPFAIEAENSILDISGFSKQYNCAFIWQKDGVKKLNLYLIINYFKGGKLRFKKIKPEAFEANRFYTVINKKSGEIVPMEVNFNFDDPNLIILPLAFGKRQGREFIWNDLLSLETGSLKLANGRVIEKTLYNRRTRQDEPALFVALTFERREVLDSSNIKPMNLIGVDRGENIPAVIALTDPEGCPLSRFKDSLGNPTHILRIGESYKEKQRTIQAKKEVEQRRAGGYSRKYASKAKNLADDMVRNTARDLLYYAVTQDAMLIFENLSRGFGRQGKRTFMAERQYTRMEDWLTAKLAYEGLPSKTYLSKTLAQYTSKTCSNCGFTITSADYDRVLEKLKKTATGWMTTINGKELKVEGQITYYNRYKRQNVVKDLSVELDRLSEESVNNDISSWTKGRSGEALSLLKKRFSHRPVQEKFVCLNCGFETHADEQAALNIARSWLFLRSQEYKKYQTNKTTGNTDKRAFVETWQSFYRKKLKEVWKPAV

SEQ ID NO: 14202 - protein, 978 aa, synthetic construct
QEIKRINKIRRRLVKDSNTKKAGKTGPMKTLLVRVMTPDLRERLENLRKKPENIPQPISNTSRANLNKLLTDYTEMKKAILHVYWEEFQKDPVGLMSRVAQPASKKIDQNKLKPEMDEKGNLTTAGFACSQCGQPLFVYKLEQVSEKGKAYTNYFGRCNVAEHEKLIKLAQLKPEKDSDEAVTYSLGKFGQRALDFYSIHVTKESTHPVKPLAQIAGNRYASGPVGKALSDACMGTIASFLSKYQDIIIEHQKVVKGNQKRLESLRELAGKENLEYPSVTLPPQPHTKEGVDAYNEVIARVRTWVNLNLWQKLKLSRDDAKPLLRLKGFPSFPLVERQANEVDWWDMVCNVKKLINEKKEDGKVFWQNLAGYKRQEALRPYLSSEEDRKKGKKFARYQLGDLLLHLEKKHGEDWGKVYDEAWERIDKKVEGLSKHIKLEEERRSEDAQSKAALTDWLRAKASFVIEGLKEADKDEFCRCELKLQKWYGDLRGKPFAIEAENSILDISGFSKQYNCAFIWQKDGVKKLNLYLIINYFKGGKLRFKKIKPEAFEANRFYTVINKKSGEIVPMEVNFNFDDPNLIILPLAFGKRQGREFIWNDLLSLETGSLKLANGRVIEKTLYNRRTRQDEPALFVALTFERREVLDSSNIKPMNLIGVDRGENIPAVIALTDPEGCPLSRFKDSLGNPTHILRIGESYKEKQRTIQAKKEVEQRRAGGYSRKYASKAKNLADDMVRNTARDLLYYAVTQDAMLIFENLSRGFGRQGKRTFMAERQYTRMEDWLTAKLAYEGLPSKTYLSKTLAQYTSKTCSNCGFTITSADYDRVLEKLKKTATGWMTTINGKELKVEGQITYYNRYKRQNVVKDLSVELDRLSEESVNNDISSWTKGRSGEALSLLKKRFSHRPVQEKFVCLNCGFETHADEQAALNIARSWLFLRSQEYKKYQTNKTTGNTDKRAFVETWQSFYRKKLKEVWKPAV

SEQ ID NO: 14203 - protein, 978 aa, synthetic construct
QEIKRINKIRRRLVKDSNTKKAGKTGPMKTLLVRVMTPDLRERLENLRKKPENIPQPISNTSRANLNKLLTDYTEMKKAILHVYWEEFQKDPVGLMSRVAQPASKKIDQNKLKPEMDEKGNLTTAGFACSQCGQPLFVYKLEQVSEKGKAYTNYFGRCNVAEHEKLIKLAQLKPEKDSDEAVTYSLGKFGQRALDFYSIHVTKESTHPVKPLAQIAGNRYASGPVGKALSDACMGTIASFLSKYQDIIIEHQKVVKGNQKRLESLRELAGKENLEYPSVTLPPQPHTKEGVDAYNEVIARVRMWVNLNLWQKLKLSRDDAKPLLRLKGFPSFPLVERQANEVDWWDMVCNVKKLINEKKEDGKVFWQNLAGYKRQEALRPYLSSEEDRKKGKKFARTQLGDLLLHLEKKHGEDWGKVYDEAWERIDKKVEGLSKHIKLEEERRSEDAQSKAALTDWLRAKASFVIEGLKEADKDEFCRCELKLQKWYGDLRGKPFAIEAENSILDISGFSKQYNCAFIWQKDGVKKLNLYLIINYFKGGKLRFKKIKPEAFEANRFYTVINKKSGEIVPMEVNFNFDDPNLIILPLAFGKRQGREFIWNDLLSLETGSLKLANGRVIEKTLYNRRTRQDEPALFVALTFERREVLDSSNIKPMNLIGVDRGENIPAVIALTDPEGCPLSRFKDSLGNPTHILRIGESYKEKQRTIQAKKEVEQRRAGGYSRKYASKAKNLADDMVRNTARDLLYYAVTQDAMLIFENLSRGFGRQGKRTFMAERQYTRMEDWLTAKLAYEGLPSKTYLSKTLAQYTSKTCSNCGFTITSADYDRVLEKLKKTATGWMTTINGKELKVEGQITYYNRYKRQNVVKDLSVELDRLSEESVNNDISSWTKGRSGEALSLLKKRFSHRPVQEKFVCLNCGFETHADEQAALNIARSWLFLRSQEYKKYQTNKTTGNTDKRAFVETWQSFYRKKLKEVWKPAV

SEQ ID NO: 14204 - protein, 978 aa, synthetic construct
QEIKRINKIRRRLVKDSNTKKAGKTGPMKTLLVRVMTPDLRERLENLRKKPENIPQPISNTSRANLNKLLTDYTEMKKAILHVYWEEFQKDPVGLMSRVAQPASKKIDQNKLKPEMDEKGNLTTAGFACSQCGQPLFVYKLEQVSEKGKAYTNYFGRCNVAEHEKLIKLAQLKPEKDSDEAVTYSLGKFGQRALDFYSIHVTKESTHPVKPLAQIAGNRYASGPVGKALSDACMGTIASFLSKYQDIIIEHQKVVKGNQKRLESLRELAGKENLEYPSVTLPPQPHTKEGVDAYNEVIARVRMWVNLNLWQKLKLSRDDAKPLLRLKGFPSFPLVERQANEVDWWDMVCNVKKLINEKKEDGKVFWQNLAGYKRQEALRPYLSSEEDRKKGKKFARYQLGDLLLHLEKKHGEDWGKVYDEAWERIDKKVEGLSKHIKLEEERRSEDAQSKAALTDWLRAKASFVIEGLKEADKDEFCRCELKLQKWYGDLRGKPFAIEAENSILDISGFSKQYNCAFIWQKDGVKKLNLYLIINYFKGGKLRFKKIKPEAFEANRFYTVINKKSGEIVPMEVNFNFDDPNLIILPLAFGKRQGREFIWNDLLSLETGSLKLANGRVIEKTLYNRRTRQDEPALFVALTFERREVLDSSNIKPMNLIGVDRGENIPAVIALTDPEGCPLSRFKDSLGNPTHILRIGESYKEKQRTIQAKKEVEQRRAGGYSRKYASKAKNLADDMVRNTARDLLYYAVTQDAMLIFENLSRGFGRQGKRTFMAERQYTRMEDWLTAKLAYEGLPSKTYLSKTLAQYTSKTCSNCGFTITSADYDRMLEKLKKTATGWMTTINGKELKVEGQITYYNRYKRQNVVKDLSVELDRLSEESVNNDISSWTKGRSGEALSLLKKRFSHRPVQEKFVCLNCGFETHADEQAALNIARSWLFLRSQEYKKYQTNKTTGNTDKRAFVETWQSFYRKKLKEVWKPAV

SEQ ID NO: 14205 - protein, 978 aa, synthetic construct
QEIKRINKIRRRLVKDSNTKKAGKTGPMKTLLVRVMTPDLRERLENLRKKPENIPQPISNTSRANLNKLLTDYTEMKKAILHVYWEEFQKDPVGLMSRVAQPASKKIDQNKLKPEMDEKGNLTTAGFACSQCGQPLFVYKLEQVSEKGKAYTNYFGRCNVAEHEKLIKLAQLKPEKDSDEAVTYSLGKFGQRALDFYSIHVTKESTHPVKPLAQIAGNRYASGPVGKALSDACMGTIASFLSKYQDIIIEHQKVVKGNQKRLESLRELAGKENLEYPSVTLPPQPHTKEGVDAYNEVIARVRMWVNLNLWQKLKLSRDDAKPLLRLKGFPSFPLVERQANEVDWWDMVCNVKKLINEKKEDGKVFWQNLAGYKRQEALRPYLSSEEDRKKGKKFARYQLGDLLLHLEKKHGEDWGKVYDEAWERIDKKVEGLSKHIKLEEERRSEDAQSKAALTDWLRAKASFVIEGLKEADKDEFCRCELKLQKWYGDLRGKPFAIEAENSILDISGFSKQYNCAFIWQKDGVKKLNLYLIINYFKGGKLRFKKIKPEAFEANRFYTVINKKSGEIVPMEVNFNFDDPNLIILPLAFGKRQGREFIWNDLLSLETGSLKLANGRVIEKTLYNRRTRQDEPALFVALTFERREVLDSSNIKPMNLIGVDRGENIPAVIALTDPEGCPLSRFKDSLGNPTHILRIGESYKEKQRTIQAKKEVEQRRAGGYSRKYASKAKNLADDMVRNTARDLLYYAVTQDAMLIFENLSRGFGRQGKRTFMAERQYTRMEDWLTAKLAYEGLPSKTYLSKTLAQYTSKTCSNCGFTITSADYDRVLEKLKKTATGWMTTINGKELKVEGQITYYNRYKRQNVVKDLSVELDRLSEESVNNDISSWDKGRSGEALSLLKKRFSHRPVQEKFVCLNCGFETHADEQAALNIARSWLFLRSQEYKKYQTNKTTGNTDKRAFVETWQSFYRKKLKEVWKPAV

SEQ ID NO: 14206 - protein, 978 aa, synthetic construct
QEIKRINKIRRRLVKDSNTKKAGKTGPMKTLLVRVMTPDLRERLENLRKKPENIPQPISNTSRANLNKLLTDYTEMKKAILHVYWEEFQKDPVGLMSRVAQPASKKIDQNKLKPEMDEKGNLTTAGFACSQCGQPLFVYKLEQVSEKGKAYTNYFGRCNVAEHEKLIKLAQLKPEKDSDEAVTYSLGKFGQRALDFYSIHVTKESTHPVKPLAQIAGNRYASGPVGKALSDACMGTIASFLSKYQDIIIEHQKVVKGNQKRLESLRELAGKENLEYPSVTLPPQPHTKEGVDAYNEVIARVRMWVNLNLWQKLKLSRDDAKPLLRLKGFPSFPLVERQANEVDWWDMVCNVKKLINEKKEDGKVFWQNLAGYKRQEALRPYLSSEEDRKKGKKFARYQLGDLLLHLEKKHGEDWGKVYDEAWERIDKKVEGLSKHIKLEEERRSEDAQSKAALTDWLRAKASFVIEGLKEADKDEFCRCELKLQKWYGDLRGKPFAIEAENSILDISGFSKQYNCAFIWQKDGVKKLNLYLIINYFKGGKLRFKKIKPEAFEANRFYTVINKKSGEIVPMEVNFNFDDPNLIILPLAFGKRQGREFIWNDLLSLETGSLKLANGRVIEKTLYNRRTRQDEPALFVALTFERREVLDSSNIKPMNLIGVDRGENIPAVIALTDPEGCPLSRFKDSLGNPTHILRIGESYKEKQRTIQAKKEVEQRRAGGYSRKYASKAKNLADDMVRNTARDLLYYAVTQDAMLIFENLSRGFGRQGKRTFMAERQYTRMEDWLTAKLAYEGLPSKTYLSKTLAQYTSKTCSNCGFTITSADYDRVLEKLKKTATGWMTTINGKELKVEGQITYYNRYKRQNVVKDLSVELDRLSEESVNNDISSWTKGRQGEALSLLKKRFSHRPVQEKFVCLNCGFETHADEQAALNIARSWLFLRSQEYKKYQTNKTTGNTDKRAFVETWQSFYRKKLKEVWKPAV

SEQ ID NO: 14207 - protein, 978 aa, synthetic construct
QEIKRINKIRRRLVKDSNTKKAGKTGPMKTLLVRVMTPDLRERLENLRKKPENIPQPISNTSRANLNKLLTDYTEMKKAILHVYWEEFQKDPVGLMSRVAQPASKKIDQNKLKPEMDEKGNLTTAGFACSQCGQPLFVYKLEQVSEKGKAYTNYFGRCNVAEHEKLIQLDQLKPEKDSDEAVTYSLGKFGQRALDFYSIHVTKESTHPVKPLAQIAGNRYASGPVGKALSDACMGTIASFLSKYQDIIIEHQKVVKGNQKRLESLRELAGKENLEYPSVTLPPQPHTKEGVDAYNEVIARVRMWVNLNLWQKLKLSRDDAKPLLRLKGFPSFPLVERQANEVDWWDMVCNVKKLINEKKEDGKVFWQNLAGYKRQEALRPYLSSEEDRKKGKKFARYQLGDLLLHLEKKHGEDWGKVYDEAWERIDKKVEGLSKHIKLEEERRSEDAQSKAALTDWLRAKASFVIEGLKEADKDEFCRCELKLQKWYGDLRGKPFAIEAENSILDISGFSKQYNCAFIWQKDGVKKLNLYLIINYFKGGKLRFKKIKPEAFEANRFYTVINKKSGEIVPMEVNFNFDDPNLIILPLAFGKRQGREFIWNDLLSLETGSLKLANGRVIEKTLYNRRTRQDEPALFVALTFERREVLDSSNIKPMNLIGVDRGENIPAVIALTDPEGCPLSRFKDSLGNPTHILRIGESYKEKQRTIQAKKEVEQRRAGGYSRKYASKAKNLADDMVRNTARDLLYYAVTQDAMLIFENLSRGFGRQGKRTFMAERQYTRMEDWLTAKLAYEGLPSKTYLSKTLAQYTSKTCSNCGFTITSADYDRVLEKLKKTATGWMTTINGKELKVEGQITYYNRYKRQNVVKDLSVELDRLSEESVNNDISSWTKGRSGEALSLLKKRFSHRPVQEKFVCLNCGFETHADEQAALNIARSWLFLRSQEYKKYQTNKTTGNTDKRAFVETWQSFYRKKLKEVWKPAV

SEQ ID NO: 14208 - protein, 978 aa, synthetic construct
QEIKRINKIRRRLVKDSNTKKAGKTGPMKTLLVRVMTPDLRERLENLRKKPENIPQPISNTSRANLNKLLTDYTEMKKAILHVYWEEFQKDPVGLMSRVAQPASKKIDQNKLKPEMDEKGNLTTAGFACSQCGQPLFVYKLEQVSEKGKAYTNYFGRCNVAEHEKLIQLYQLKPEKDSDEAVTYSLGKFGQRALDFYSIHVTKESTHPVKPLAQIAGNRYASGPVGKALSDACMGTIASFLSKYQDIIIEHQKVVKGNQKRLESLRELAGKENLEYPSVTLPPQPHTKEGVDAYNEVIARVRMWVNLNLWQKLKLSRDDAKPLLRLKGFPSFPLVERQANEVDWWDMVCNVKKLINEKKEDGKVFWQNLAGYKRQEALRPYLSSEEDRKKGKKFARYQLGDLLLHLEKKHGEDWGKVYDEAWERIDKKVEGLSKHIKLEEERRSEDAQSKAALTDWLRAKASFVIEGLKEADKDEFCRCELKLQKWYGDLRGKPFAIEAENSILDISGFSKQYNCAFIWQKDGVKKLNLYLIINYFKGGKLRFKKIKPEAFEANRFYTVINKKSGEIVPMEVNFNFDDPNLIILPLAFGKRQGREFIWNDLLSLETGSLKLANGRVIEKTLYNRRTRQDEPALFVALTFERREVLDSSNIKPMNLIGVDRGENIPAVIALTDPEGCPLSRFKDSLGNPTHILRIGESYKEKQRTIQAKKEVEQRRAGGYSRKYASKAKNLADDMVRNTARDLLYYAVTQDAMLIFENLSRGFGRQGKRTFMAERQYTRMEDWLTAKLAYEGLPSKTYLSKTLAQYTSKTCSNCGFTITSADYDRVLEKLKKTATGWMTTINGKELKVEGQITYYNRYKRQNVVKDLSVELDRLSEESVNNDISSWTKGRSGEALSLLKKRFSHRPVQEKFVCLNCGFETHADEQAALNIARSWLFLRSQEYKKYQTNKTTGNTDKRAFVETWQSFYRKKLKEVWKPAV

SEQ ID NO: 14209 - protein, 978 aa, synthetic construct
QEIKRINKIRRRLVKDSNTKKAGKTGPMKTLLVRVMTPDLRERLENLRKKPENIPQPISNTSRANLNKLLTDYTEMKKAILHVYWEEFQKDPVGLMSRVAQPASKKIDQNKLKPEMDEKGNLTTAGFACSQCGQPLFVYKLEQVSEKGKAYTNYFGRCNVAEHEKLIQLSQLKPEKDSDEAVTYSLGKFGQRALDFYSIHVTKESTHPVKPLAQIAGNRYASGPVGKALSDACMGTIASFLSKYQDIIIEHQKVVKGNQKRLESLRELAGKENLEYPSVTLPPQPHTKEGVDAYNEVIARVRMWVNLNLWQKLKLSRDDAKPLLRLKGFPSFPLVERQANEVDWWDMVCNVKKLINEKKEDGKVFWQNLAGYKRQEALRPYLSSEEDRKKGKKFARYQLGDLLLHLEKKHGEDWGKVYDEAWERIDKKVEGLSKHIKLEEERRSEDAQSKAALTDWLRAKASFVIEGLKEADKDEFCRCELKLQKWYGDLRGKPFAIEAENSILDISGFSKQYNCAFIWQKDGVKKLNLYLIINYFKGGKLRFKKIKPEAFEANRFYTVINKKSGEIVPMEVNFNFDDPNLIILPLAFGKRQGREFIWNDLLSLETGSLKLANGRVIEKTLYNRRTRQDEPALFVALTFERREVLDSSNIKPMNLIGVDRGENIPAVIALTDPEGCPLSRFKDSLGNPTHILRIGESYKEKQRTIQAKKEVEQRRAGGYSRKYASKAKNLADDMVRNTARDLLYYAVTQDAMLIFENLSRGFGRQGKRTFMAERQYTRMEDWLTAKLAYEGLPSKTYLSKTLAQYTSKTCSNCGFTITSADYDRVLEKLKKTATGWMTTINGKELKVEGQITYYNRYKRQNVVKDLSVELDRLSEESVNNDISSWTKGRSGEALSLLKKRFSHRPVQEKFVCLNCGFETHADEQAALNIARSWLFLRSQEYKKYQTNKTTGNTDKRAFVETWQSFYRKKLKEVWKPAV

SEQ ID NO: 14210 - protein, 978 aa, synthetic construct
QEIKRINKIRRRLVKDSNTKKAGKTGPMKTLLVRVMTPDLRERLENLRKKPENIPQPISNTSRANLNKLLTDYTEMKKAILHVYWEEFQKDPVGLMSRVAQPASKKIDQNKLKPEMDEKGNLTTAGFACSQCGQPLFVYKLEQVSEKGKAYTNYFGRCNVAEHEKLIQLAQLKPEKDSDEAVTYSLGKFGQRALDFYSIHVTKESTHPVKPLAQIAGNRYASTPVGKALSDACMGTIASFLSKYQDIIIEHQKVVKGNQKRLESLRELAGKENLEYPSVTLPPQPHTKEGVDAYNEVIARVRMWVNLNLWQKLKLSRDDAKPLLRLKGFPSFPLVERQANEVDWWDMVCNVKKLINEKKEDGKVFWQNLAGYKRQEALRPYLSSEEDRKKGKKFARYQLGDLLLHLEKKHGEDWGKVYDEAWERIDKKVEGLSKHIKLEEERRSEDAQSKAALTDWLRAKASFVIEGLKEADKDEFCRCELKLQKWYGDLRGKPFAIEAENSILDISGFSKQYNCAFIWQKDGVKKLNLYLIINYFKGGKLRFKKIKPEAFEANRFYTVINKKSGEIVPMEVNFNFDDPNLIILPLAFGKRQGREFIWNDLLSLETGSLKLANGRVIEKTLYNRRTRQDEPALFVALTFERREVLDSSNIKPMNLIGVDRGENIPAVIALTDPEGCPLSRFKDSLGNPTHILRIGESYKEKQRTIQAKKEVEQRRAGGYSRKYASKAKNLADDMVRNTARDLLYYAVTQDAMLIFENLSRGFGRQGKRTFMAERQYTRMEDWLTAKLAYEGLPSKTYLSKTLAQYTSKTCSNCGFTITSADYDRVLEKLKKTATGWMTTINGKELKVEGQITYYNRYKRQNVVKDLSVELDRLSEESVNNDISSWTKGRSGEALSLLKKRFSHRPVQEKFVCLNCGFETHADEQAALNIARSWLFLRSQEYKKYQTNKTTGNTDKRAFVETWQSFYRKKLKEVWKPAV

SEQ ID NO: 14211 - protein, 978 aa, synthetic construct
QEIKRINKIRRRLVKDSNTKKAGKTGPMKTLLVRVMTPDLRERLENLRKKPENIPQPISNTSRANLNKLLTDYTEMKKAILHVYWEEFQKDPVGLMSRVAQPASKKIDQNKLKPEMDEKGNLTTAGFACSQCGQPLFVYKLEQVSEKGKAYTNYFGRCNVAEHEKLIQLAQLKPEKDSDEAVTYSLGKFGQRALDFYSIHVTKESTHPVKPLAQIAGNRYASGPVGKALSDACMGTIASFLSKYQDIIIEHQKVVKGNQKRLESLRELAGKENLEYPSVTLPPQPHTKEGVDAYNEVIARVRTWVNLNLWQKLKLSRDDAKPLLRLKGFPSFPLVERQANEVDWWDMVCNVKKLINEKKEDGKVFWQNLAGYKRQEALRPYLSSEEDRKKGKKFARYQLGDLLLHLEKKHGEDWGKVYDEAWERIDKKVEGLSKHIKLEEERRSEDAQSKAALTDWLRAKASFVIEGLKEADKDEFCRCELKLQKWYGDLRGKPFAIEAENSILDISGFSKQYNCAFIWQKDGVKKLNLYLIINYFKGGKLRFKKIKPEAFEANRFYTVINKKSGEIVPMEVNFNFDDPNLIILPLAFGKRQGREFIWNDLLSLETGSLKLANGRVIEKTLYNRRTRQDEPALFVALTFERREVLDSSNIKPMNLIGVDRGENIPAVIALTDPEGCPLSRFKDSLGNPTHILRIGESYKEKQRTIQAKKEVEQRRAGGYSRKYASKAKNLADDMVRNTARDLLYYAVTQDAMLIFENLSRGFGRQGKRTFMAERQYTRMEDWLTAKLAYEGLPSKTYLSKTLAQYTSKTCSNCGFTITSADYDRVLEKLKKTATGWMTTINGKELKVEGQITYYNRYKRQNVVKDLSVELDRLSEESVNNDISSWTKGRSGEALSLLKKRFSHRPVQEKFVCLNCGFETHADEQAALNIARSWLFLRSQEYKKYQTNKTTGNTDKRAFVETWQSFYRKKLKEVWKPAV

SEQ ID NO: 14212 - protein, 978 aa, synthetic construct
QEIKRINKIRRRLVKDSNTKKAGKTGPMKTLLVRVMTPDLRERLENLRKKPENIPQPISNTSRANLNKLLTDYTEMKKAILHVYWEEFQKDPVGLMSRVAQPASKKIDQNKLKPEMDEKGNLTTAGFACSQCGQPLFVYKLEQVSEKGKAYTNYFGRCNVAEHEKLIQLAQLKPEKDSDEAVTYSLGKFGQRALDFYSIHVTKESTHPVKPLAQIAGNRYASGPVGKALSDACMGTIASFLSKYQDIIIEHQKVVKGNQKRLESLRELAGKENLEYPSVTLPPQPHTKEGVDAYNEVIARVRMWVNLNLWQKLKLSRDDAKPLLRLKGFPSFPLVERQANEVDWWDMVCNVKKLINEKKEDGKVFWQNLAGYKRQEALRPYLSSEEDRKKGKKFARTQLGDLLLHLEKKHGEDWGKVYDEAWERIDKKVEGLSKHIKLEEERRSEDAQSKAALTDWLRAKASFVIEGLKEADKDEFCRCELKLQKWYGDLRGKPFAIEAENSILDISGFSKQYNCAFIWQKDGVKKLNLYLIINYFKGGKLRFKKIKPEAFEANRFYTVINKKSGEIVPMEVNFNFDDPNLIILPLAFGKRQGREFIWNDLLSLETGSLKLANGRVIEKTLYNRRTRQDEPALFVALTFERREVLDSSNIKPMNLIGVDRGENIPAVIALTDPEGCPLSRFKDSLGNPTHILRIGESYKEKQRTIQAKKEVEQRRAGGYSRKYASKAKNLADDMVRNTARDLLYYAVTQDAMLIFENLSRGFGRQGKRTFMAERQYTRMEDWLTAKLAYEGLPSKTYLSKTLAQYTSKTCSNCGFTITSADYDRVLEKLKKTATGWMTTINGKELKVEGQITYYNRYKRQNVVKDLSVELDRLSEESVNNDISSWTKGRSGEALSLLKKRFSHRPVQEKFVCLNCGFETHADEQAALNIARSWLFLRSQEYKKYQTNKTTGNTDKRAFVETWQSFYRKKLKEVWKPAV

SEQ ID NO: 14213 - protein, 978 aa, synthetic construct
QEIKRINKIRRRLVKDSNTKKAGKTGPMKTLLVRVMTPDLRERLENLRKKPENIPQPISNTSRANLNKLLTDYTEMKKAILHVYWEEFQKDPVGLMSRVAQPASKKIDQNKLKPEMDEKGNLTTAGFACSQCGQPLFVYKLEQVSEKGKAYTNYFGRCNVAEHEKLIQLAQLKPEKDSDEAVTYSLGKFGQRALDFYSIHVTKESTHPVKPLAQIAGNRYASGPVGKALSDACMGTIASFLSKYQDIIIEHQKVVKGNQKRLESLRELAGKENLEYPSVTLPPQPHTKEGVDAYNEVIARVRMWVNLNLWQKLKLSRDDAKPLLRLKGFPSFPLVERQANEVDWWDMVCNVKKLINEKKEDGKVFWQNLAGYKRQEALRPYLSSEEDRKKGKKFARYQLGDLLLHLEKKHGEDWGKVYDEAWERIDKKVEGLSKHIKLEEERRSEDAQSKAALTDWLRAKASFVIEGLKEADKDEFCRCELKLQKWYGDLRGKPFAIEAENSILDISGFSKQYNCAFIWQKDGVKKLNLYLIINYFKGGKLRFKKIKPEAFEANRFYTVINKKSGEIVPMEVNFNFDDPNLIILPLAFGKRQGREFIWNDLLSLETGSLKLANGRVIEKTLYNRRTRQDEPALFVALTFERREVLDSSNIKPMNLIGVDRGENIPAVIALTDPEGCPLSRFKDSLGNPTHILRIGESYKEKQRTIQAKKEVEQRRAGGYSRKYASKAKNLADDMVRNTARDLLYYAVTQDAMLIFENLSRGFGRQGKRTFMAERQYTRMEDWLTAKLAYEGLPSKTYLSKTLAQYTSKTCSNCGFTITSADYDRMLEKLKKTATGWMTTINGKELKVEGQITYYNRYKRQNVVKDLSVELDRLSEESVNNDISSWTKGRSGEALSLLKKRFSHRPVQEKFVCLNCGFETHADEQAALNIARSWLFLRSQEYKKYQTNKTTGNTDKRAFVETWQSFYRKKLKEVWKPAV

SEQ ID NO: 14214 - protein, 978 aa, synthetic construct
QEIKRINKIRRRLVKDSNTKKAGKTGPMKTLLVRVMTPDLRERLENLRKKPENIPQPISNTSRANLNKLLTDYTEMKKAILHVYWEEFQKDPVGLMSRVAQPASKKIDQNKLKPEMDEKGNLTTAGFACSQCGQPLFVYKLEQVSEKGKAYTNYFGRCNVAEHEKLIQLAQLKPEKDSDEAVTYSLGKFGQRALDFYSIHVTKESTHPVKPLAQIAGNRYASGPVGKALSDACMGTIASFLSKYQDIIIEHQKVVKGNQKRLESLRELAGKENLEYPSVTLPPQPHTKEGVDAYNEVIARVRMWVNLNLWQKLKLSRDDAKPLLRLKGFPSFPLVERQANEVDWWDMVCNVKKLINEKKEDGKVFWQNLAGYKRQEALRPYLSSEEDRKKGKKFARYQLGDLLLHLEKKHGEDWGKVYDEAWERIDKKVEGLSKHIKLEEERRSEDAQSKAALTDWLRAKASFVIEGLKEADKDEFCRCELKLQKWYGDLRGKPFAIEAENSILDISGFSKQYNCAFIWQKDGVKKLNLYLIINYFKGGKLRFKKIKPEAFEANRFYTVINKKSGEIVPMEVNFNFDDPNLIILPLAFGKRQGREFIWNDLLSLETGSLKLANGRVIEKTLYNRRTRQDEPALFVALTFERREVLDSSNIKPMNLIGVDRGENIPAVIALTDPEGCPLSRFKDSLGNPTHILRIGESYKEKQRTIQAKKEVEQRRAGGYSRKYASKAKNLADDMVRNTARDLLYYAVTQDAMLIFENLSRGFGRQGKRTFMAERQYTRMEDWLTAKLAYEGLPSKTYLSKTLAQYTSKTCSNCGFTITSADYDRVLEKLKKTATGWMTTINGKELKVEGQITYYNRYKRQNVVKDLSVELDRLSEESVNNDISSWDKGRSGEALSLLKKRFSHRPVQEKFVCLNCGFETHADEQAALNIARSWLFLRSQEYKKYQTNKTTGNTDKRAFVETWQSFYRKKLKEVWKPAV

SEQ ID NO: 14215 - protein, 978 aa, synthetic construct
QEIKRINKIRRRLVKDSNTKKAGKTGPMKTLLVRVMTPDLRERLENLRKKPENIPQPISNTSRANLNKLLTDYTEMKKAILHVYWEEFQKDPVGLMSRVAQPASKKIDQNKLKPEMDEKGNLTTAGFACSQCGQPLFVYKLEQVSEKGKAYTNYFGRCNVAEHEKLIQLAQLKPEKDSDEAVTYSLGKFGQRALDFYSIHVTKESTHPVKPLAQIAGNRYASGPVGKALSDACMGTIASFLSKYQDIIIEHQKVVKGNQKRLESLRELAGKENLEYPSVTLPPQPHTKEGVDAYNEVIARVRMWVNLNLWQKLKLSRDDAKPLLRLKGFPSFPLVERQANEVDWWDMVCNVKKLINEKKEDGKVFWQNLAGYKRQEALRPYLSSEEDRKKGKKFARYQLGDLLLHLEKKHGEDWGKVYDEAWERIDKKVEGLSKHIKLEEERRSEDAQSKAALTDWLRAKASFVIEGLKEADKDEFCRCELKLQKWYGDLRGKPFAIEAENSILDISGFSKQYNCAFIWQKDGVKKLNLYLIINYFKGGKLRFKKIKPEAFEANRFYTVINKKSGEIVPMEVNFNFDDPNLIILPLAFGKRQGREFIWNDLLSLETGSLKLANGRVIEKTLYNRRTRQDEPALFVALTFERREVLDSSNIKPMNLIGVDRGENIPAVIALTDPEGCPLSRFKDSLGNPTHILRIGESYKEKQRTIQAKKEVEQRRAGGYSRKYASKAKNLADDMVRNTARDLLYYAVTQDAMLIFENLSRGFGRQGKRTFMAERQYTRMEDWLTAKLAYEGLPSKTYLSKTLAQYTSKTCSNCGFTITSADYDRVLEKLKKTATGWMTTINGKELKVEGQITYYNRYKRQNVVKDLSVELDRLSEESVNNDISSWTKGRQGEALSLLKKRFSHRPVQEKFVCLNCGFETHADEQAALNIARSWLFLRSQEYKKYQTNKTTGNTDKRAFVETWQSFYRKKLKEVWKPAV

SEQ ID NO: 14216 - protein, 978 aa, synthetic construct
QEIKRINKIRRRLVKDSNTKKAGKTGPMKTLLVRVMTPDLRERLENLRKKPENIPQPISNTSRANLNKLLTDYTEMKKAILHVYWEEFQKDPVGLMSRVAQPASKKIDQNKLKPEMDEKGNLTTAGFACSQCGQPLFVYKLEQVSEKGKAYTNYFGRCNVAEHEKLILLDQLKPEKDSDEAVTYSLGKFGQRALDFYSIHVTKESTHPVKPLAQIAGNRYASTPVGKALSDACMGTIASFLSKYQDIIIEHQKVVKGNQKRLESLRELAGKENLEYPSVTLPPQPHTKEGVDAYNEVIARVRMWVNLNLWQKLKLSRDDAKPLLRLKGFPSFPLVERQANEVDWWDMVCNVKKLINEKKEDGKVFWQNLAGYKRQEALRPYLSSEEDRKKGKKFARYQLGDLLLHLEKKHGEDWGKVYDEAWERIDKKVEGLSKHIKLEEERRSEDAQSKAALTDWLRAKASFVIEGLKEADKDEFCRCELKLQKWYGDLRGKPFAIEAENSILDISGFSKQYNCAFIWQKDGVKKLNLYLIINYFKGGKLRFKKIKPEAFEANRFYTVINKKSGEIVPMEVNFNFDDPNLIILPLAFGKRQGREFIWNDLLSLETGSLKLANGRVIEKTLYNRRTRQDEPALFVALTFERREVLDSSNIKPMNLIGVDRGENIPAVIALTDPEGCPLSRFKDSLGNPTHILRIGESYKEKQRTIQAKKEVEQRRAGGYSRKYASKAKNLADDMVRNTARDLLYYAVTQDAMLIFENLSRGFGRQGKRTFMAERQYTRMEDWLTAKLAYEGLPSKTYLSKTLAQYTSKTCSNCGFTITSADYDRVLEKLKKTATGWMTTINGKELKVEGQITYYNRYKRQNVVKDLSVELDRLSEESVNNDISSWTKGRSGEALSLLKKRFSHRPVQEKFVCLNCGFETHADEQAALNIARSWLFLRSQEYKKYQTNKTTGNTDKRAFVETWQSFYRKKLKEVWKPAV

SEQ ID NO: 14217 - protein, 978 aa, synthetic construct
QEIKRINKIRRRLVKDSNTKKAGKTGPMKTLLVRVMTPDLRERLENLRKKPENIPQPISNTSRANLNKLLTDYTEMKKAILHVYWEEFQKDPVGLMSRVAQPASKKIDQNKLKPEMDEKGNLTTAGFACSQCGQPLFVYKLEQVSEKGKAYTNYFGRCNVAEHEKLILLDQLKPEKDSDEAVTYSLGKFGQRALDFYSIHVTKESTHPVKPLAQIAGNRYASGPVGKALSDACMGTIASFLSKYQDIIIEHQKVVKGNQKRLESLRELAGKENLEYPSVTLPPQPHTKEGVDAYNEVIARVRTWVNLNLWQKLKLSRDDAKPLLRLKGFPSFPLVERQANEVDWWDMVCNVKKLINEKKEDGKVFWQNLAGYKRQEALRPYLSSEEDRKKGKKFARYQLGDLLLHLEKKHGEDWGKVYDEAWERIDKKVEGLSKHIKLEEERRSEDAQSKAALTDWLRAKASFVIEGLKEADKDEFCRCELKLQKWYGDLRGKPFAIEAENSILDISGFSKQYNCAFIWQKDGVKKLNLYLIINYFKGGKLRFKKIKPEAFEANRFYTVINKKSGEIVPMEVNFNFDDPNLIILPLAFGKRQGREFIWNDLLSLETGSLKLANGRVIEKTLYNRRTRQDEPALFVALTFERREVLDSSNIKPMNLIGVDRGENIPAVIALTDPEGCPLSRFKDSLGNPTHILRIGESYKEKQRTIQAKKEVEQRRAGGYSRKYASKAKNLADDMVRNTARDLLYYAVTQDAMLIFENLSRGFGRQGKRTFMAERQYTRMEDWLTAKLAYEGLPSKTYLSKTLAQYTSKTCSNCGFTITSADYDRVLEKLKKTATGWMTTINGKELKVEGQITYYNRYKRQNVVKDLSVELDRLSEESVNNDISSWTKGRSGEALSLLKKRFSHRPVQEKFVCLNCGFETHADEQAALNIARSWLFLRSQEYKKYQTNKTTGNTDKRAFVETWQSFYRKKLKEVWKPAV

SEQ ID NO: 14218 - protein, 978 aa, synthetic construct
QEIKRINKIRRRLVKDSNTKKAGKTGPMKTLLVRVMTPDLRERLENLRKKPENIPQPISNTSRANLNKLLTDYTEMKKAILHVYWEEFQKDPVGLMSRVAQPASKKIDQNKLKPEMDEKGNLTTAGFACSQCGQPLFVYKLEQVSEKGKAYTNYFGRCNVAEHEKLILLDQLKPEKDSDEAVTYSLGKFGQRALDFYSIHVTKESTHPVKPLAQIAGNRYASGPVGKALSDACMGTIASFLSKYQDIIIEHQKVVKGNQKRLESLRELAGKENLEYPSVTLPPQPHTKEGVDAYNEVIARVRMWVNLNLWQKLKLSRDDAKPLLRLKGFPSFPLVERQANEVDWWDMVCNVKKLINEKKEDGKVFWQNLAGYKRQEALRPYLSSEEDRKKGKKFARTQLGDLLLHLEKKHGEDWGKVYDEAWERIDKKVEGLSKHIKLEEERRSEDAQSKAALTDWLRAKASFVIEGLKEADKDEFCRCELKLQKWYGDLRGKPFAIEAENSILDISGFSKQYNCAFIWQKDGVKKLNLYLIINYFKGGKLRFKKIKPEAFEANRFYTVINKKSGEIVPMEVNFNFDDPNLIILPLAFGKRQGREFIWNDLLSLETGSLKLANGRVIEKTLYNRRTRQDEPALFVALTFERREVLDSSNIKPMNLIGVDRGENIPAVIALTDPEGCPLSRFKDSLGNPTHILRIGESYKEKQRTIQAKKEVEQRRAGGYSRKYASKAKNLADDMVRNTARDLLYYAVTQDAMLIFENLSRGFGRQGKRTFMAERQYTRMEDWLTAKLAYEGLPSKTYLSKTLAQYTSKTCSNCGFTITSADYDRVLEKLKKTATGWMTTINGKELKVEGQITYYNRYKRQNVVKDLSVELDRLSEESVNNDISSWTKGRSGEALSLLKKRFSHRPVQEKFVCLNCGFETHADEQAALNIARSWLFLRSQEYKKYQTNKTTGNTDKRAFVETWQSFYRKKLKEVWKPAV

SEQ ID NO: 14219 - protein, 978 aa, synthetic construct
QEIKRINKIRRRLVKDSNTKKAGKTGPMKTLLVRVMTPDLRERLENLRKKPENIPQPISNTSRANLNKLLTDYTEMKKAILHVYWEEFQKDPVGLMSRVAQPASKKIDQNKLKPEMDEKGNLTTAGFACSQCGQPLFVYKLEQVSEKGKAYTNYFGRCNVAEHEKLILLDQLKPEKDSDEAVTYSLGKFGQRALDFYSIHVTKESTHPVKPLAQIAGNRYASGPVGKALSDACMGTIASFLSKYQDIIIEHQKVVKGNQKRLESLRELAGKENLEYPSVTLPPQPHTKEGVDAYNEVIARVRMWVNLNLWQKLKLSRDDAKPLLRLKGFPSFPLVERQANEVDWWDMVCNVKKLINEKKEDGKVFWQNLAGYKRQEALRPYLSSEEDRKKGKKFARYQLGDLLLHLEKKHGEDWGKVYDEAWERIDKKVEGLSKHIKLEEERRSEDAQSKAALTDWLRAKASFVIEGLKEADKDEFCRCELKLQKWYGDLRGKPFAIEAENSILDISGFSKQYNCAFIWQKDGVKKLNLYLIINYFKGGKLRFKKIKPEAFEANRFYTVINKKSGEIVPMEVNFNFDDPNLIILPLAFGKRQGREFIWNDLLSLETGSLKLANGRVIEKTLYNRRTRQDEPALFVALTFERREVLDSSNIKPMNLIGVDRGENIPAVIALTDPEGCPLSRFKDSLGNPTHILRIGESYKEKQRTIQAKKEVEQRRAGGYSRKYASKAKNLADDMVRNTARDLLYYAVTQDAMLIFENLSRGFGRQGKRTFMAERQYTRMEDWLTAKLAYEGLPSKTYLSKTLAQYTSKTCSNCGFTITSADYDRMLEKLKKTATGWMTTINGKELKVEGQITYYNRYKRQNVVKDLSVELDRLSEESVNNDISSWTKGRSGEALSLLKKRFSHRPVQEKFVCLNCGFETHADEQAALNIARSWLFLRSQEYKKYQTNKTTGNTDKRAFVETWQSFYRKKLKEVWKPAV

SEQ ID NO: 14220 - protein, 978 aa, synthetic construct
QEIKRINKIRRRLVKDSNTKKAGKTGPMKTLLVRVMTPDLRERLENLRKKPENIPQPISNTSRANLNKLLTDYTEMKKAILHVYWEEFQKDPVGLMSRVAQPASKKIDQNKLKPEMDEKGNLTTAGFACSQCGQPLFVYKLEQVSEKGKAYTNYFGRCNVAEHEKLILLDQLKPEKDSDEAVTYSLGKFGQRALDFYSIHVTKESTHPVKPLAQIAGNRYASGPVGKALSDACMGTIASFLSKYQDIIIEHQKVVKGNQKRLESLRELAGKENLEYPSVTLPPQPHTKEGVDAYNEVIARVRMWVNLNLWQKLKLSRDDAKPLLRLKGFPSFPLVERQANEVDWWDMVCNVKKLINEKKEDGKVFWQNLAGYKRQEALRPYLSSEEDRKKGKKFARYQLGDLLLHLEKKHGEDWGKVYDEAWERIDKKVEGLSKHIKLEEERRSEDAQSKAALTDWLRAKASFVIEGLKEADKDEFCRCELKLQKWYGDLRGKPFAIEAENSILDISGFSKQYNCAFIWQKDGVKKLNLYLIINYFKGGKLRFKKIKPEAFEANRFYTVINKKSGEIVPMEVNFNFDDPNLIILPLAFGKRQGREFIWNDLLSLETGSLKLANGRVIEKTLYNRRTRQDEPALFVALTFERREVLDSSNIKPMNLIGVDRGENIPAVIALTDPEGCPLSRFKDSLGNPTHILRIGESYKEKQRTIQAKKEVEQRRAGGYSRKYASKAKNLADDMVRNTARDLLYYAVTQDAMLIFENLSRGFGRQGKRTFMAERQYTRMEDWLTAKLAYEGLPSKTYLSKTLAQYTSKTCSNCGFTITSADYDRVLEKLKKTATGWMTTINGKELKVEGQITYYNRYKRQNVVKDLSVELDRLSEESVNNDISSWDKGRSGEALSLLKKRFSHRPVQEKFVCLNCGFETHADEQAALNIARSWLFLRSQEYKKYQTNKTTGNTDKRAFVETWQSFYRKKLKEVWKPAV

SEQ ID NO: 14221 - protein, 978 aa, synthetic construct
QEIKRINKIRRRLVKDSNTKKAGKTGPMKTLLVRVMTPDLRERLENLRKKPENIPQPISNTSRANLNKLLTDYTEMKKAILHVYWEEFQKDPVGLMSRVAQPASKKIDQNKLKPEMDEKGNLTTAGFACSQCGQPLFVYKLEQVSEKGKAYTNYFGRCNVAEHEKLILLDQLKPEKDSDEAVTYSLGKFGQRALDFYSIHVTKESTHPVKPLAQIAGNRYASGPVGKALSDACMGTIASFLSKYQDIIIEHQKVVKGNQKRLESLRELAGKENLEYPSVTLPPQPHTKEGVDAYNEVIARVRMWVNLNLWQKLKLSRDDAKPLLRLKGFPSFPLVERQANEVDWWDMVCNVKKLINEKKEDGKVFWQNLAGYKRQEALRPYLSSEEDRKKGKKFARYQLGDLLLHLEKKHGEDWGKVYDEAWERIDKKVEGLSKHIKLEEERRSEDAQSKAALTDWLRAKASFVIEGLKEADKDEFCRCELKLQKWYGDLRGKPFAIEAENSILDISGFSKQYNCAFIWQKDGVKKLNLYLIINYFKGGKLRFKKIKPEAFEANRFYTVINKKSGEIVPMEVNFNFDDPNLIILPLAFGKRQGREFIWNDLLSLETGSLKLANGRVIEKTLYNRRTRQDEPALFVALTFERREVLDSSNIKPMNLIGVDRGENIPAVIALTDPEGCPLSRFKDSLGNPTHILRIGESYKEKQRTIQAKKEVEQRRAGGYSRKYASKAKNLADDMVRNTARDLLYYAVTQDAMLIFENLSRGFGRQGKRTFMAERQYTRMEDWLTAKLAYEGLPSKTYLSKTLAQYTSKTCSNCGFTITSADYDRVLEKLKKTATGWMTTINGKELKVEGQITYYNRYKRQNVVKDLSVELDRLSEESVNNDISSWTKGRQGEALSLLKKRFSHRPVQEKFVCLNCGFETHADEQAALNIARSWLFLRSQEYKKYQTNKTTGNTDKRAFVETWQSFYRKKLKEVWKPAV

SEQ ID NO: 14222 - protein, 978 aa, synthetic construct
QEIKRINKIRRRLVKDSNTKKAGKTGPMKTLLVRVMTPDLRERLENLRKKPENIPQPISNTSRANLNKLLTDYTEMKKAILHVYWEEFQKDPVGLMSRVAQPASKKIDQNKLKPEMDEKGNLTTAGFACSQCGQPLFVYKLEQVSEKGKAYTNYFGRCNVAEHEKLILLYQLKPEKDSDEAVTYSLGKFGQRALDFYSIHVTKESTHPVKPLAQIAGNRYASTPVGKALSDACMGTIASFLSKYQDIIIEHQKVVKGNQKRLESLRELAGKENLEYPSVTLPPQPHTKEGVDAYNEVIARVRMWVNLNLWQKLKLSRDDAKPLLRLKGFPSFPLVERQANEVDWWDMVCNVKKLINEKKEDGKVFWQNLAGYKRQEALRPYLSSEEDRKKGKKFARYQLGDLLLHLEKKHGEDWGKVYDEAWERIDKKVEGLSKHIKLEEERRSEDAQSKAALTDWLRAKASFVIEGLKEADKDEFCRCELKLQKWYGDLRGKPFAIEAENSILDISGFSKQYNCAFIWQKDGVKKLNLYLIINYFKGGKLRFKKIKPEAFEANRFYTVINKKSGEIVPMEVNFNFDDPNLIILPLAFGKRQGREFIWNDLLSLETGSLKLANGRVIEKTLYNRRTRQDEPALFVALTFERREVLDSSNIKPMNLIGVDRGENIPAVIALTDPEGCPLSRFKDSLGNPTHILRIGESYKEKQRTIQAKKEVEQRRAGGYSRKYASKAKNLADDMVRNTARDLLYYAVTQDAMLIFENLSRGFGRQGKRTFMAERQYTRMEDWLTAKLAYEGLPSKTYLSKTLAQYTSKTCSNCGFTITSADYDRVLEKLKKTATGWMTTINGKELKVEGQITYYNRYKRQNVVKDLSVELDRLSEESVNNDISSWTKGRSGEALSLLKKRFSHRPVQEKFVCLNCGFETHADEQAALNIARSWLFLRSQEYKKYQTNKTTGNTDKRAFVETWQSFYRKKLKEVWKPAV

SEQ ID NO: 14223 - protein, 978 aa, synthetic construct
QEIKRINKIRRRLVKDSNTKKAGKTGPMKTLLVRVMTPDLRERLENLRKKPENIPQPISNTSRANLNKLLTDYTEMKKAILHVYWEEFQKDPVGLMSRVAQPASKKIDQNKLKPEMDEKGNLTTAGFACSQCGQPLFVYKLEQVSEKGKAYTNYFGRCNVAEHEKLILLYQLKPEKDSDEAVTYSLGKFGQRALDFYSIHVTKESTHPVKPLAQIAGNRYASGPVGKALSDACMGTIASFLSKYQDIIIEHQKVVKGNQKRLESLRELAGKENLEYPSVTLPPQPHTKEGVDAYNEVIARVRTWVNLNLWQKLKLSRDDAKPLLRLKGFPSFPLVERQANEVDWWDMVCNVKKLINEKKEDGKVFWQNLAGYKRQEALRPYLSSEEDRKKGKKFARYQLGDLLLHLEKKHGEDWGKVYDEAWERIDKKVEGLSKHIKLEEERRSEDAQSKAALTDWLRAKASFVIEGLKEADKDEFCRCELKLQKWYGDLRGKPFAIEAENSILDISGFSKQYNCAFIWQKDGVKKLNLYLIINYFKGGKLRFKKIKPEAFEANRFYTVINKKSGEIVPMEVNFNFDDPNLIILPLAFGKRQGREFIWNDLLSLETGSLKLANGRVIEKTLYNRRTRQDEPALFVALTFERREVLDSSNIKPMNLIGVDRGENIPAVIALTDPEGCPLSRFKDSLGNPTHILRIGESYKEKQRTIQAKKEVEQRRAGGYSRKYASKAKNLADDMVRNTARDLLYYAVTQDAMLIFENLSRGFGRQGKRTFMAERQYTRMEDWLTAKLAYEGLPSKTYLSKTLAQYTSKTCSNCGFTITSADYDRVLEKLKKTATGWMTTINGKELKVEGQITYYNRYKRQNVVKDLSVELDRLSEESVNNDISSWTKGRSGEALSLLKKRFSHRPVQEKFVCLNCGFETHADEQAALNIARSWLFLRSQEYKKYQTNKTTGNTDKRAFVETWQSFYRKKLKEVWKPAV

SEQ ID NO: 14224 - protein, 978 aa, synthetic construct
QEIKRINKIRRRLVKDSNTKKAGKTGPMKTLLVRVMTPDLRERLENLRKKPENIPQPISNTSRANLNKLLTDYTEMKKAILHVYWEEFQKDPVGLMSRVAQPASKKIDQNKLKPEMDEKGNLTTAGFACSQCGQPLFVYKLEQVSEKGKAYTNYFGRCNVAEHEKLILLYQLKPEKDSDEAVTYSLGKFGQRALDFYSIHVTKESTHPVKPLAQIAGNRYASGPVGKALSDACMGTIASFLSKYQDIIIEHQKVVKGNQKRLESLRELAGKENLEYPSVTLPPQPHTKEGVDAYNEVIARVRMWVNLNLWQKLKLSRDDAKPLLRLKGFPSFPLVERQANEVDWWDMVCNVKKLINEKKEDGKVFWQNLAGYKRQEALRPYLSSEEDRKKGKKFARTQLGDLLLHLEKKHGEDWGKVYDEAWERIDKKVEGLSKHIKLEEERRSEDAQSKAALTDWLRAKASFVIEGLKEADKDEFCRCELKLQKWYGDLRGKPFAIEAENSILDISGFSKQYNCAFIWQKDGVKKLNLYLIINYFKGGKLRFKKIKPEAFEANRFYTVINKKSGEIVPMEVNFNFDDPNLIILPLAFGKRQGREFIWNDLLSLETGSLKLANGRVIEKTLYNRRTRQDEPALFVALTFERREVLDSSNIKPMNLIGVDRGENIPAVIALTDPEGCPLSRFKDSLGNPTHILRIGESYKEKQRTIQAKKEVEQRRAGGYSRKYASKAKNLADDMVRNTARDLLYYAVTQDAMLIFENLSRGFGRQGKRTFMAERQYTRMEDWLTAKLAYEGLPSKTYLSKTLAQYTSKTCSNCGFTITSADYDRVLEKLKKTATGWMTTINGKELKVEGQITYYNRYKRQNVVKDLSVELDRLSEESVNNDISSWTKGRSGEALSLLKKRFSHRPVQEKFVCLNCGFETHADEQAALNIARSWLFLRSQEYKKYQTNKTTGNTDKRAFVETWQSFYRKKLKEVWKPAV

SEQ ID NO: 14225 - protein, 978 aa, synthetic construct
QEIKRINKIRRRLVKDSNTKKAGKTGPMKTLLVRVMTPDLRERLENLRKKPENIPQPISNTSRANLNKLLTDYTEMKKAILHVYWEEFQKDPVGLMSRVAQPASKKIDQNKLKPEMDEKGNLTTAGFACSQCGQPLFVYKLEQVSEKGKAYTNYFGRCNVAEHEKLILLYQLKPEKDSDEAVTYSLGKFGQRALDFYSIHVTKESTHPVKPLAQIAGNRYASGPVGKALSDACMGTIASFLSKYQDIIIEHQKVVKGNQKRLESLRELAGKENLEYPSVTLPPQPHTKEGVDAYNEVIARVRMWVNLNLWQKLKLSRDDAKPLLRLKGFPSFPLVERQANEVDWWDMVCNVKKLINEKKEDGKVFWQNLAGYKRQEALRPYLSSEEDRKKGKKFARYQLGDLLLHLEKKHGEDWGKVYDEAWERIDKKVEGLSKHIKLEEERRSEDAQSKAALTDWLRAKASFVIEGLKEADKDEFCRCELKLQKWYGDLRGKPFAIEAENSILDISGFSKQYNCAFIWQKDGVKKLNLYLIINYFKGGKLRFKKIKPEAFEANRFYTVINKKSGEIVPMEVNFNFDDPNLIILPLAFGKRQGREFIWNDLLSLETGSLKLANGRVIEKTLYNRRTRQDEPALFVALTFERREVLDSSNIKPMNLIGVDRGENIPAVIALTDPEGCPLSRFKDSLGNPTHILRIGESYKEKQRTIQAKKEVEQRRAGGYSRKYASKAKNLADDMVRNTARDLLYYAVTQDAMLIFENLSRGFGRQGKRTFMAERQYTRMEDWLTAKLAYEGLPSKTYLSKTLAQYTSKTCSNCGFTITSADYDRMLEKLKKTATGWMTTINGKELKVEGQITYYNRYKRQNVVKDLSVELDRLSEESVNNDISSWTKGRSGEALSLLKKRFSHRPVQEKFVCLNCGFETHADEQAALNIARSWLFLRSQEYKKYQTNKTTGNTDKRAFVETWQSFYRKKLKEVWKPAV

SEQ ID NO: 14226 - protein, 978 aa, synthetic construct
QEIKRINKIRRRLVKDSNTKKAGKTGPMKTLLVRVMTPDLRERLENLRKKPENIPQPISNTSRANLNKLLTDYTEMKKAILHVYWEEFQKDPVGLMSRVAQPASKKIDQNKLKPEMDEKGNLTTAGFACSQCGQPLFVYKLEQVSEKGKAYTNYFGRCNVAEHEKLILLYQLKPEKDSDEAVTYSLGKFGQRALDFYSIHVTKESTHPVKPLAQIAGNRYASGPVGKALSDACMGTIASFLSKYQDIIIEHQKVVKGNQKRLESLRELAGKENLEYPSVTLPPQPHTKEGVDAYNEVIARVRMWVNLNLWQKLKLSRDDAKPLLRLKGFPSFPLVERQANEVDWWDMVCNVKKLINEKKEDGKVFWQNLAGYKRQEALRPYLSSEEDRKKGKKFARYQLGDLLLHLEKKHGEDWGKVYDEAWERIDKKVEGLSKHIKLEEERRSEDAQSKAALTDWLRAKASFVIEGLKEADKDEFCRCELKLQKWYGDLRGKPFAIEAENSILDISGFSKQYNCAFIWQKDGVKKLNLYLIINYFKGGKLRFKKIKPEAFEANRFYTVINKKSGEIVPMEVNFNFDDPNLIILPLAFGKRQGREFIWNDLLSLETGSLKLANGRVIEKTLYNRRTRQDEPALFVALTFERREVLDSSNIKPMNLIGVDRGENIPAVIALTDPEGCPLSRFKDSLGNPTHILRIGESYKEKQRTIQAKKEVEQRRAGGYSRKYASKAKNLADDMVRNTARDLLYYAVTQDAMLIFENLSRGFGRQGKRTFMAERQYTRMEDWLTAKLAYEGLPSKTYLSKTLAQYTSKTCSNCGFTITSADYDRVLEKLKKTATGWMTTINGKELKVEGQITYYNRYKRQNVVKDLSVELDRLSEESVNNDISSWDKGRSGEALSLLKKRFSHRPVQEKFVCLNCGFETHADEQAALNIARSWLFLRSQEYKKYQTNKTTGNTDKRAFVETWQSFYRKKLKEVWKPAV

SEQ ID NO: 14227 - protein, 978 aa, synthetic construct
QEIKRINKIRRRLVKDSNTKKAGKTGPMKTLLVRVMTPDLRERLENLRKKPENIPQPISNTSRANLNKLLTDYTEMKKAILHVYWEEFQKDPVGLMSRVAQPASKKIDQNKLKPEMDEKGNLTTAGFACSQCGQPLFVYKLEQVSEKGKAYTNYFGRCNVAEHEKLILLYQLKPEKDSDEAVTYSLGKFGQRALDFYSIHVTKESTHPVKPLAQIAGNRYASGPVGKALSDACMGTIASFLSKYQDIIIEHQKVVKGNQKRLESLRELAGKENLEYPSVTLPPQPHTKEGVDAYNEVIARVRMWVNLNLWQKLKLSRDDAKPLLRLKGFPSFPLVERQANEVDWWDMVCNVKKLINEKKEDGKVFWQNLAGYKRQEALRPYLSSEEDRKKGKKFARYQLGDLLLHLEKKHGEDWGKVYDEAWERIDKKVEGLSKHIKLEEERRSEDAQSKAALTDWLRAKASFVIEGLKEADKDEFCRCELKLQKWYGDLRGKPFAIEAENSILDISGFSKQYNCAFIWQKDGVKKLNLYLIINYFKGGKLRFKKIKPEAFEANRFYTVINKKSGEIVPMEVNFNFDDPNLIILPLAFGKRQGREFIWNDLLSLETGSLKLANGRVIEKTLYNRRTRQDEPALFVALTFERREVLDSSNIKPMNLIGVDRGENIPAVIALTDPEGCPLSRFKDSLGNPTHILRIGESYKEKQRTIQAKKEVEQRRAGGYSRKYASKAKNLADDMVRNTARDLLYYAVTQDAMLIFENLSRGFGRQGKRTFMAERQYTRMEDWLTAKLAYEGLPSKTYLSKTLAQYTSKTCSNCGFTITSADYDRVLEKLKKTATGWMTTINGKELKVEGQITYYNRYKRQNVVKDLSVELDRLSEESVNNDISSWTKGRQGEALSLLKKRFSHRPVQEKFVCLNCGFETHADEQAALNIARSWLFLRSQEYKKYQTNKTTGNTDKRAFVETWQSFYRKKLKEVWKPAV

SEQ ID NO: 14228 - protein, 978 aa, synthetic construct
QEIKRINKIRRRLVKDSNTKKAGKTGPMKTLLVRVMTPDLRERLENLRKKPENIPQPISNTSRANLNKLLTDYTEMKKAILHVYWEEFQKDPVGLMSRVAQPASKKIDQNKLKPEMDEKGNLTTAGFACSQCGQPLFVYKLEQVSEKGKAYTNYFGRCNVAEHEKLILLSQLKPEKDSDEAVTYSLGKFGQRALDFYSIHVTKESTHPVKPLAQIAGNRYASTPVGKALSDACMGTIASFLSKYQDIIIEHQKVVKGNQKRLESLRELAGKENLEYPSVTLPPQPHTKEGVDAYNEVIARVRMWVNLNLWQKLKLSRDDAKPLLRLKGFPSFPLVERQANEVDWWDMVCNVKKLINEKKEDGKVFWQNLAGYKRQEALRPYLSSEEDRKKGKKFARYQLGDLLLHLEKKHGEDWGKVYDEAWERIDKKVEGLSKHIKLEEERRSEDAQSKAALTDWLRAKASFVIEGLKEADKDEFCRCELKLQKWYGDLRGKPFAIEAENSILDISGFSKQYNCAFIWQKDGVKKLNLYLIINYFKGGKLRFKKIKPEAFEANRFYTVINKKSGEIVPMEVNFNFDDPNLIILPLAFGKRQGREFIWNDLLSLETGSLKLANGRVIEKTLYNRRTRQDEPALFVALTFERREVLDSSNIKPMNLIGVDRGENIPAVIALTDPEGCPLSRFKDSLGNPTHILRIGESYKEKQRTIQAKKEVEQRRAGGYSRKYASKAKNLADDMVRNTARDLLYYAVTQDAMLIFENLSRGFGRQGKRTFMAERQYTRMEDWLTAKLAYEGLPSKTYLSKTLAQYTSKTCSNCGFTITSADYDRVLEKLKKTATGWMTTINGKELKVEGQITYYNRYKRQNVVKDLSVELDRLSEESVNNDISSWTKGRSGEALSLLKKRFSHRPVQEKFVCLNCGFETHADEQAALNIARSWLFLRSQEYKKYQTNKTTGNTDKRAFVETWQSFYRKKLKEVWKPAV

SEQ ID NO: 14229 - protein, 978 aa, synthetic construct
QEIKRINKIRRRLVKDSNTKKAGKTGPMKTLLVRVMTPDLRERLENLRKKPENIPQPISNTSRANLNKLLTDYTEMKKAILHVYWEEFQKDPVGLMSRVAQPASKKIDQNKLKPEMDEKGNLTTAGFACSQCGQPLFVYKLEQVSEKGKAYTNYFGRCNVAEHEKLILLSQLKPEKDSDEAVTYSLGKFGQRALDFYSIHVTKESTHPVKPLAQIAGNRYASGPVGKALSDACMGTIASFLSKYQDIIIEHQKVVKGNQKRLESLRELAGKENLEYPSVTLPPQPHTKEGVDAYNEVIARVRTWVNLNLWQKLKLSRDDAKPLLRLKGFPSFPLVERQANEVDWWDMVCNVKKLINEKKEDGKVFWQNLAGYKRQEALRPYLSSEEDRKKGKKFARYQLGDLLLHLEKKHGEDWGKVYDEAWERIDKKVEGLSKHIKLEEERRSEDAQSKAALTDWLRAKASFVIEGLKEADKDEFCRCELKLQKWYGDLRGKPFAIEAENSILDISGFSKQYNCAFIWQKDGVKKLNLYLIINYFKGGKLRFKKIKPEAFEANRFYTVINKKSGEIVPMEVNFNFDDPNLIILPLAFGKRQGREFIWNDLLSLETGSLKLANGRVIEKTLYNRRTRQDEPALFVALTFERREVLDSSNIKPMNLIGVDRGENIPAVIALTDPEGCPLSRFKDSLGNPTHILRIGESYKEKQRTIQAKKEVEQRRAGGYSRKYASKAKNLADDMVRNTARDLLYYAVTQDAMLIFENLSRGFGRQGKRTFMAERQYTRMEDWLTAKLAYEGLPSKTYLSKTLAQYTSKTCSNCGFTITSADYDRVLEKLKKTATGWMTTINGKELKVEGQITYYNRYKRQNVVKDLSVELDRLSEESVNNDISSWTKGRSGEALSLLKKRFSHRPVQEKFVCLNCGFETHADEQAALNIARSWLFLRSQEYKKYQTNKTTGNTDKRAFVETWQSFYRKKLKEVWKPAV

SEQ ID NO: 14230 - protein, 978 aa, synthetic construct
QEIKRINKIRRRLVKDSNTKKAGKTGPMKTLLVRVMTPDLRERLENLRKKPENIPQPISNTSRANLNKLLTDYTEMKKAILHVYWEEFQKDPVGLMSRVAQPASKKIDQNKLKPEMDEKGNLTTAGFACSQCGQPLFVYKLEQVSEKGKAYTNYFGRCNVAEHEKLILLSQLKPEKDSDEAVTYSLGKFGQRALDFYSIHVTKESTHPVKPLAQIAGNRYASGPVGKALSDACMGTIASFLSKYQDIIIEHQKVVKGNQKRLESLRELAGKENLEYPSVTLPPQPHTKEGVDAYNEVIARVRMWVNLNLWQKLKLSRDDAKPLLRLKGFPSFPLVERQANEVDWWDMVCNVKKLINEKKEDGKVFWQNLAGYKRQEALRPYLSSEEDRKKGKKFARTQLGDLLLHLEKKHGEDWGKVYDEAWERIDKKVEGLSKHIKLEEERRSEDAQSKAALTDWLRAKASFVIEGLKEADKDEFCRCELKLQKWYGDLRGKPFAIEAENSILDISGFSKQYNCAFIWQKDGVKKLNLYLIINYFKGGKLRFKKIKPEAFEANRFYTVINKKSGEIVPMEVNFNFDDPNLIILPLAFGKRQGREFIWNDLLSLETGSLKLANGRVIEKTLYNRRTRQDEPALFVALTFERREVLDSSNIKPMNLIGVDRGENIPAVIALTDPEGCPLSRFKDSLGNPTHILRIGESYKEKQRTIQAKKEVEQRRAGGYSRKYASKAKNLADDMVRNTARDLLYYAVTQDAMLIFENLSRGFGRQGKRTFMAERQYTRMEDWLTAKLAYEGLPSKTYLSKTLAQYTSKTCSNCGFTITSADYDRVLEKLKKTATGWMTTINGKELKVEGQITYYNRYKRQNVVKDLSVELDRLSEESVNNDISSWTKGRSGEALSLLKKRFSHRPVQEKFVCLNCGFETHADEQAALNIARSWLFLRSQEYKKYQTNKTTGNTDKRAFVETWQSFYRKKLKEVWKPAV

SEQ ID NO: 14231 - protein, 978 aa, synthetic construct
QEIKRINKIRRRLVKDSNTKKAGKTGPMKTLLVRVMTPDLRERLENLRKKPENIPQPISNTSRANLNKLLTDYTEMKKAILHVYWEEFQKDPVGLMSRVAQPASKKIDQNKLKPEMDEKGNLTTAGFACSQCGQPLFVYKLEQVSEKGKAYTNYFGRCNVAEHEKLILLSQLKPEKDSDEAVTYSLGKFGQRALDFYSIHVTKESTHPVKPLAQIAGNRYASGPVGKALSDACMGTIASFLSKYQDIIIEHQKVVKGNQKRLESLRELAGKENLEYPSVTLPPQPHTKEGVDAYNEVIARVRMWVNLNLWQKLKLSRDDAKPLLRLKGFPSFPLVERQANEVDWWDMVCNVKKLINEKKEDGKVFWQNLAGYKRQEALRPYLSSEEDRKKGKKFARYQLGDLLLHLEKKHGEDWGKVYDEAWERIDKKVEGLSKHIKLEEERRSEDAQSKAALTDWLRAKASFVIEGLKEADKDEFCRCELKLQKWYGDLRGKPFAIEAENSILDISGFSKQYNCAFIWQKDGVKKLNLYLIINYFKGGKLRFKKIKPEAFEANRFYTVINKKSGEIVPMEVNFNFDDPNLIILPLAFGKRQGREFIWNDLLSLETGSLKLANGRVIEKTLYNRRTRQDEPALFVALTFERREVLDSSNIKPMNLIGVDRGENIPAVIALTDPEGCPLSRFKDSLGNPTHILRIGESYKEKQRTIQAKKEVEQRRAGGYSRKYASKAKNLADDMVRNTARDLLYYAVTQDAMLIFENLSRGFGRQGKRTFMAERQYTRMEDWLTAKLAYEGLPSKTYLSKTLAQYTSKTCSNCGFTITSADYDRMLEKLKKTATGWMTTINGKELKVEGQITYYNRYKRQNVVKDLSVELDRLSEESVNNDISSWTKGRSGEALSLLKKRFSHRPVQEKFVCLNCGFETHADEQAALNIARSWLFLRSQEYKKYQTNKTTGNTDKRAFVETWQSFYRKKLKEVWKPAV

SEQ ID NO: 14232 - protein, 978 aa, synthetic construct
QEIKRINKIRRRLVKDSNTKKAGKTGPMKTLLVRVMTPDLRERLENLRKKPENIPQPISNTSRANLNKLLTDYTEMKKAILHVYWEEFQKDPVGLMSRVAQPASKKIDQNKLKPEMDEKGNLTTAGFACSQCGQPLFVYKLEQVSEKGKAYTNYFGRCNVAEHEKLILLSQLKPEKDSDEAVTYSLGKFGQRALDFYSIHVTKESTHPVKPLAQIAGNRYASGPVGKALSDACMGTIASFLSKYQDIIIEHQKVVKGNQKRLESLRELAGKENLEYPSVTLPPQPHTKEGVDAYNEVIARVRMWVNLNLWQKLKLSRDDAKPLLRLKGFPSFPLVERQANEVDWWDMVCNVKKLINEKKEDGKVFWQNLAGYKRQEALRPYLSSEEDRKKGKKFARYQLGDLLLHLEKKHGEDWGKVYDEAWERIDKKVEGLSKHIKLEEERRSEDAQSKAALTDWLRAKASFVIEGLKEADKDEFCRCELKLQKWYGDLRGKPFAIEAENSILDISGFSKQYNCAFIWQKDGVKKLNLYLIINYFKGGKLRFKKIKPEAFEANRFYTVINKKSGEIVPMEVNFNFDDPNLIILPLAFGKRQGREFIWNDLLSLETGSLKLANGRVIEKTLYNRRTRQDEPALFVALTFERREVLDSSNIKPMNLIGVDRGENIPAVIALTDPEGCPLSRFKDSLGNPTHILRIGESYKEKQRTIQAKKEVEQRRAGGYSRKYASKAKNLADDMVRNTARDLLYYAVTQDAMLIFENLSRGFGRQGKRTFMAERQYTRMEDWLTAKLAYEGLPSKTYLSKTLAQYTSKTCSNCGFTITSADYDRVLEKLKKTATGWMTTINGKELKVEGQITYYNRYKRQNVVKDLSVELDRLSEESVNNDISSWDKGRSGEALSLLKKRFSHRPVQEKFVCLNCGFETHADEQAALNIARSWLFLRSQEYKKYQTNKTTGNTDKRAFVETWQSFYRKKLKEVWKPAV

SEQ ID NO: 14233 - protein, 978 aa, synthetic construct
QEIKRINKIRRRLVKDSNTKKAGKTGPMKTLLVRVMTPDLRERLENLRKKPENIPQPISNTSRANLNKLLTDYTEMKKAILHVYWEEFQKDPVGLMSRVAQPASKKIDQNKLKPEMDEKGNLTTAGFACSQCGQPLFVYKLEQVSEKGKAYTNYFGRCNVAEHEKLILLSQLKPEKDSDEAVTYSLGKFGQRALDFYSIHVTKESTHPVKPLAQIAGNRYASGPVGKALSDACMGTIASFLSKYQDIIIEHQKVVKGNQKRLESLRELAGKENLEYPSVTLPPQPHTKEGVDAYNEVIARVRMWVNLNLWQKLKLSRDDAKPLLRLKGFPSFPLVERQANEVDWWDMVCNVKKLINEKKEDGKVFWQNLAGYKRQEALRPYLSSEEDRKKGKKFARYQLGDLLLHLEKKHGEDWGKVYDEAWERIDKKVEGLSKHIKLEEERRSEDAQSKAALTDWLRAKASFVIEGLKEADKDEFCRCELKLQKWYGDLRGKPFAIEAENSILDISGFSKQYNCAFIWQKDGVKKLNLYLIINYFKGGKLRFKKIKPEAFEANRFYTVINKKSGEIVPMEVNFNFDDPNLIILPLAFGKRQGREFIWNDLLSLETGSLKLANGRVIEKTLYNRRTRQDEPALFVALTFERREVLDSSNIKPMNLIGVDRGENIPAVIALTDPEGCPLSRFKDSLGNPTHILRIGESYKEKQRTIQAKKEVEQRRAGGYSRKYASKAKNLADDMVRNTARDLLYYAVTQDAMLIFENLSRGFGRQGKRTFMAERQYTRMEDWLTAKLAYEGLPSKTYLSKTLAQYTSKTCSNCGFTITSADYDRVLEKLKKTATGWMTTINGKELKVEGQITYYNRYKRQNVVKDLSVELDRLSEESVNNDISSWTKGRQGEALSLLKKRFSHRPVQEKFVCLNCGFETHADEQAALNIARSWLFLRSQEYKKYQTNKTTGNTDKRAFVETWQSFYRKKLKEVWKPAV

SEQ ID NO: 14234 - protein, 978 aa, synthetic construct
QEGKRINKIRRRLVKDSNTKKAGKTGPMKTLLVPVMTPDLRERLENLRKKPENIPQPISNTSRANLNKLLTDYTEMKKAILHVYWEEFQKDPVGLMSRVAQPASKKIDQNKLKPEMDEKGNLTTAGFACSQCGQPLFVYKLEQVSEKGKAYTNYFGRCNVAEHEKLILLAQLKPEKDSDEAVTYSLGKFGQRALDFYSIHVTKESTHPVKPLAQIAGNRYASGPVGKALSDACMGTIASFLSKYQDIIIEHQKVVKGNQKRLESLRELAGKENLEYPSVTLPPQPHTKEGVDAYNEVIARVRMWVNLNLWQKLKLSRDDAKPLLRLKGFPSFPLVERQANEVDWWDMVCNVKKLINEKKEDGKVFWQNLAGYKRQEALRPYLSSEEDRKKGKKFARYQLGDLLLHLEKKHGEDWGKVYDEAWERIDKKVEGLSKHIKLEEERRSEDAQSKAALTDWLRAKASFVIEGLKEADKDEFCRCELKLQKWYGDLRGKPFAIEAENSILDISGFSKQYNCAFIWQKDGVKKLNLYLIINYFKGGKLRFKKIKPEAFEANRFYTVINKKSGEIVPMEVNFNFDDPNLIILPLAFGKRQGREFIWNDLLSLETGSLKLANGRVIEKTLYNRRTRQDEPALFVALTFERREVLDSSNIKPMNLIGVDRGENIPAVIALTDPEGCPLSRFKDSLGNPTHILRIGESYKEKQRTIQAKKEVEQRRAGGYSRKYASKAKNLADDMVRNTARDLLYYAVTQDAMLIFENLSRGFGRQGKRTFMAERQYTRMEDWLTAKLAYEGLPSKTYLSKTLAQYTSKTCSNCGFTITSADYDRVLEKLKKTATGWMTTINGKELKVEGQITYYNRYKRQNVVKDLSVELDRLSEESVNNDISSWTKGRSGEALSLLKKRFSHRPVQEKFVCLNCGFETHADEQAALNIARSWLFLRSQEYKKYQTNKTTGNTDKRAFVETWQSFYRKKLKEVWKPAV

SEQ ID NO: 14235 - protein, 978 aa, synthetic construct
QEIKRINKIRRRLVKDSNTKKAGKTGPMKTLLVRVMTPDLRERLENLRKKPENIPQPISNTSRANLNKLLTDYTEMKKAILHVYWEEFQKDPVGLMSRVAQPASKKIDQNKLKPEMDEKGNLTTAGFACSQCGQPLFVYKLEQVSEKGKAYTNYFGRCNVAEHEKLILLAQLKPEKDSDEAVTYSLGKFGQRALDFYSIHVTKESTHPVKPLAQIAGNRYASTPVGKALSDACMGTIASFLSKYQDIIIEHQKVVKGNQKRLESLRELAGKENLEYPSVTLPPQPHTKEGVDAYNEVIARVRTWVNLNLWQKLKLSRDDAKPLLRLKGFPSFPLVERQANEVDWWDMVCNVKKLINEKKEDGKVFWQNLAGYKRQEALRPYLSSEEDRKKGKKFARYQLGDLLLHLEKKHGEDWGKVYDEAWERIDKKVEGLSKHIKLEEERRSEDAQSKAALTDWLRAKASFVIEGLKEADKDEFCRCELKLQKWYGDLRGKPFAIEAENSILDISGFSKQYNCAFIWQKDGVKKLNLYLIINYFKGGKLRFKKIKPEAFEANRFYTVINKKSGEIVPMEVNFNFDDPNLIILPLAFGKRQGREFIWNDLLSLETGSLKLANGRVIEKTLYNRRTRQDEPALFVALTFERREVLDSSNIKPMNLIGVDRGENIPAVIALTDPEGCPLSRFKDSLGNPTHILRIGESYKEKQRTIQAKKEVEQRRAGGYSRKYASKAKNLADDMVRNTARDLLYYAVTQDAMLIFENLSRGFGRQGKRTFMAERQYTRMEDWLTAKLAYEGLPSKTYLSKTLAQYTSKTCSNCGFTITSADYDRVLEKLKKTATGWMTTINGKELKVEGQITYYNRYKRQNVVKDLSVELDRLSEESVNNDISSWTKGRSGEALSLLKKRFSHRPVQEKFVCLNCGFETHADEQAALNIARSWLFLRSQEYKKYQTNKTTGNTDKRAFVETWQSFYRKKLKEVWKPAV

SEQ ID NO: 14236 - protein, 978 aa, synthetic construct
QEIKRINKIRRRLVKDSNTKKAGKTGPMKTLLVRVMTPDLRERLENLRKKPENIPQPISNTSRANLNKLLTDYTEMKKAILHVYWEEFQKDPVGLMSRVAQPASKKIDQNKLKPEMDEKGNLTTAGFACSQCGQPLFVYKLEQVSEKGKAYTNYFGRCNVAEHEKLILLAQLKPEKDSDEAVTYSLGKFGQRALDFYSIHVTKESTHPVKPLAQIAGNRYASTPVGKALSDACMGTIASFLSKYQDIIIEHQKVVKGNQKRLESLRELAGKENLEYPSVTLPPQPHTKEGVDAYNEVIARVRMWVNLNLWQKLKLSRDDAKPLLRLKGFPSFPLVERQANEVDWWDMVCNVKKLINEKKEDGKVFWQNLAGYKRQEALRPYLSSEEDRKKGKKFARTQLGDLLLHLEKKHGEDWGKVYDEAWERIDKKVEGLSKHIKLEEERRSEDAQSKAALTDWLRAKASFVIEGLKEADKDEFCRCELKLQKWYGDLRGKPFAIEAENSILDISGFSKQYNCAFIWQKDGVKKLNLYLIINYFKGGKLRFKKIKPEAFEANRFYTVINKKSGEIVPMEVNFNFDDPNLIILPLAFGKRQGREFIWNDLLSLETGSLKLANGRVIEKTLYNRRTRQDEPALFVALTFERREVLDSSNIKPMNLIGVDRGENIPAVIALTDPEGCPLSRFKDSLGNPTHILRIGESYKEKQRTIQAKKEVEQRRAGGYSRKYASKAKNLADDMVRNTARDLLYYAVTQDAMLIFENLSRGFGRQGKRTFMAERQYTRMEDWLTAKLAYEGLPSKTYLSKTLAQYTSKTCSNCGFTITSADYDRVLEKLKKTATGWMTTINGKELKVEGQITYYNRYKRQNVVKDLSVELDRLSEESVNNDISSWTKGRSGEALSLLKKRFSHRPVQEKFVCLNCGFETHADEQAALNIARSWLFLRSQEYKKYQTNKTTGNTDKRAFVETWQSFYRKKLKEVWKPAV

SEQ ID NO: 14237 - protein, 978 aa, synthetic construct
QEIKRINKIRRRLVKDSNTKKAGKTGPMKTLLVRVMTPDLRERLENLRKKPENIPQPISNTSRANLNKLLTDYTEMKKAILHVYWEEFQKDPVGLMSRVAQPASKKIDQNKLKPEMDEKGNLTTAGFACSQCGQPLFVYKLEQVSEKGKAYTNYFGRCNVAEHEKLILLAQLKPEKDSDEAVTYSLGKFGQRALDFYSIHVTKESTHPVKPLAQIAGNRYASTPVGKALSDACMGTIASFLSKYQDIIIEHQKVVKGNQKRLESLRELAGKENLEYPSVTLPPQPHTKEGVDAYNEVIARVRMWVNLNLWQKLKLSRDDAKPLLRLKGFPSFPLVERQANEVDWWDMVCNVKKLINEKKEDGKVFWQNLAGYKRQEALRPYLSSEEDRKKGKKFARYQLGDLLLHLEKKHGEDWGKVYDEAWERIDKKVEGLSKHIKLEEERRSEDAQSKAALTDWLRAKASFVIEGLKEADKDEFCRCELKLQKWYGDLRGKPFAIEAENSILDISGFSKQYNCAFIWQKDGVKKLNLYLIINYFKGGKLRFKKIKPEAFEANRFYTVINKKSGEIVPMEVNFNFDDPNLIILPLAFGKRQGREFIWNDLLSLETGSLKLANGRVIEKTLYNRRTRQDEPALFVALTFERREVLDSSNIKPMNLIGVDRGENIPAVIALTDPEGCPLSRFKDSLGNPTHILRIGESYKEKQRTIQAKKEVEQRRAGGYSRKYASKAKNLADDMVRNTARDLLYYAVTQDAMLIFENLSRGFGRQGKRTFMAERQYTRMEDWLTAKLAYEGLPSKTYLSKTLAQYTSKTCSNCGFTITSADYDRMLEKLKKTATGWMTTINGKELKVEGQITYYNRYKRQNVVKDLSVELDRLSEESVNNDISSWTKGRSGEALSLLKKRFSHRPVQEKFVCLNCGFETHADEQAALNIARSWLFLRSQEYKKYQTNKTTGNTDKRAFVETWQSFYRKKLKEVWKPAV

SEQ ID NO: 14238 - protein, 978 aa, synthetic construct
QEIKRINKIRRRLVKDSNTKKAGKTGPMKTLLVRVMTPDLRERLENLRKKPENIPQPISNTSRANLNKLLTDYTEMKKAILHVYWEEFQKDPVGLMSRVAQPASKKIDQNKLKPEMDEKGNLTTAGFACSQCGQPLFVYKLEQVSEKGKAYTNYFGRCNVAEHEKLILLAQLKPEKDSDEAVTYSLGKFGQRALDFYSIHVTKESTHPVKPLAQIAGNRYASTPVGKALSDACMGTIASFLSKYQDIIIEHQKVVKGNQKRLESLRELAGKENLEYPSVTLPPQPHTKEGVDAYNEVIARVRMWVNLNLWQKLKLSRDDAKPLLRLKGFPSFPLVERQANEVDWWDMVCNVKKLINEKKEDGKVFWQNLAGYKRQEALRPYLSSEEDRKKGKKFARYQLGDLLLHLEKKHGEDWGKVYDEAWERIDKKVEGLSKHIKLEEERRSEDAQSKAALTDWLRAKASFVIEGLKEADKDEFCRCELKLQKWYGDLRGKPFAIEAENSILDISGFSKQYNCAFIWQKDGVKKLNLYLIINYFKGGKLRFKKIKPEAFEANRFYTVINKKSGEIVPMEVNFNFDDPNLIILPLAFGKRQGREFIWNDLLSLETGSLKLANGRVIEKTLYNRRTRQDEPALFVALTFERREVLDSSNIKPMNLIGVDRGENIPAVIALTDPEGCPLSRFKDSLGNPTHILRIGESYKEKQRTIQAKKEVEQRRAGGYSRKYASKAKNLADDMVRNTARDLLYYAVTQDAMLIFENLSRGFGRQGKRTFMAERQYTRMEDWLTAKLAYEGLPSKTYLSKTLAQYTSKTCSNCGFTITSADYDRVLEKLKKTATGWMTTINGKELKVEGQITYYNRYKRQNVVKDLSVELDRLSEESVNNDISSWDKGRSGEALSLLKKRFSHRPVQEKFVCLNCGFETHADEQAALNIARSWLFLRSQEYKKYQTNKTTGNTDKRAFVETWQSFYRKKLKEVWKPAV

SEQ ID NO: 14239 - protein, 978 aa, synthetic construct
QEIKRINKIRRRLVKDSNTKKAGKTGPMKTLLVRVMTPDLRERLENLRKKPENIPQPISNTSRANLNKLLTDYTEMKKAILHVYWEEFQKDPVGLMSRVAQPASKKIDQNKLKPEMDEKGNLTTAGFACSQCGQPLFVYKLEQVSEKGKAYTNYFGRCNVAEHEKLILLAQLKPEKDSDEAVTYSLGKFGQRALDFYSIHVTKESTHPVKPLAQIAGNRYASTPVGKALSDACMGTIASFLSKYQDIIIEHQKVVKGNQKRLESLRELAGKENLEYPSVTLPPQPHTKEGVDAYNEVIARVRMWVNLNLWQKLKLSRDDAKPLLRLKGFPSFPLVERQANEVDWWDMVCNVKKLINEKKEDGKVFWQNLAGYKRQEALRPYLSSEEDRKKGKKFARYQLGDLLLHLEKKHGEDWGKVYDEAWERIDKKVEGLSKHIKLEEERRSEDAQSKAALTDWLRAKASFVIEGLKEADKDEFCRCELKLQKWYGDLRGKPFAIEAENSILDISGFSKQYNCAFIWQKDGVKKLNLYLIINYFKGGKLRFKKIKPEAFEANRFYTVINKKSGEIVPMEVNFNFDDPNLIILPLAFGKRQGREFIWNDLLSLETGSLKLANGRVIEKTLYNRRTRQDEPALFVALTFERREVLDSSNIKPMNLIGVDRGENIPAVIALTDPEGCPLSRFKDSLGNPTHILRIGESYKEKQRTIQAKKEVEQRRAGGYSRKYASKAKNLADDMVRNTARDLLYYAVTQDAMLIFENLSRGFGRQGKRTFMAERQYTRMEDWLTAKLAYEGLPSKTYLSKTLAQYTSKTCSNCGFTITSADYDRVLEKLKKTATGWMTTINGKELKVEGQITYYNRYKRQNVVKDLSVELDRLSEESVNNDISSWTKGRQGEALSLLKKRFSHRPVQEKFVCLNCGFETHADEQAALNIARSWLFLRSQEYKKYQTNKTTGNTDKRAFVETWQSFYRKKLKEVWKPAV

SEQ ID NO: 14240 - protein, 979 aa, synthetic construct
QEIGKRINKIRRRLVKDSNTKKAGKTGPMKTLLVPVMTPDLRERLENLRKKPENIPQPISNTSRANLNKLLTDYTEMKKAILHVYWEEFQKDPVGLMSRVAQPASKKIDQNKLKPEMDEKGNLTTAGFACSQCGQPLFVYKLEQVSEKGKAYTNYFGRCNVAEHEKLILLAQLKPEKDSDEAVTYSLGKFGQRALDFYSIHVTKESTHPVKPLAQIAGNRYASGPVGKALSDACMGTIASFLSKYQDIIIEHQKVVKGNQKRLESLRELAGKENLEYPSVTLPPQPHTKEGVDAYNEVIARVRMWVNLNLWQKLKLSRDDAKPLLRLKGFPSFPLVERQANEVDWWDMVCNVKKLINEKKEDGKVFWQNLAGYKRQEALRPYLSSEEDRKKGKKFARYQLGDLLLHLEKKHGEDWGKVYDEAWERIDKKVEGLSKHIKLEEERRSEDAQSKAALTDWLRAKASFVIEGLKEADKDEFCRCELKLQKWYGDLRGKPFAIEAENSILDISGFSKQYNCAFIWQKDGVKKLNLYLIINYFKGGKLRFKKIKPEAFEANRFYTVINKKSGEIVPMEVNFNFDDPNLIILPLAFGKRQGREFIWNDLLSLETGSLKLANGRVIEKTLYNRRTRQDEPALFVALTFERREVLDSSNIKPMNLIGVDRGENIPAVIALTDPEGCPLSRFKDSLGNPTHILRIGESYKEKQRTIQAKKEVEQRRAGGYSRKYASKAKNLADDMVRNTARDLLYYAVTQDAMLIFENLSRGFGRQGKRTFMAERQYTRMEDWLTAKLAYEGLPSKTYLSKTLAQYTSKTCSNCGFTITSADYDRVLEKLKKTATGWMTTINGKELKVEGQITYYNRYKRQNVVKDLSVELDRLSEESVNNDISSWTKGRSGEALSLLKKRFSHRPVQEKFVCLNCGFETHADEQAALNIARSWLFLRSQEYKKYQTNKTTGNTDKRAFVETWQSFYRKKLKEVWKPAV

SEQ ID NO: 14241 - protein, 979 aa, synthetic construct
QEGKRINKIRRRLVKDSNTKKAGKTRGPMKTLLVRVMTPDLRERLENLRKKPENIPQPISNTSRANLNKLLTDYTEMKKAILHVYWEEFQKDPVGLMSRVAQPASKKIDQNKLKPEMDEKGNLTTAGFACSQCGQPLFVYKLEQVSEKGKAYTNYFGRCNVAEHEKLILLAQLKPEKDSDEAVTYSLGKFGQRALDFYSIHVTKESTHPVKPLAQIAGNRYASGPVGKALSDACMGTIASFLSKYQDIIIEHQKVVKGNQKRLESLRELAGKENLEYPSVTLPPQPHTKEGVDAYNEVIARVRMWVNLNLWQKLKLSRDDAKPLLRLKGFPSFPLVERQANEVDWWDMVCNVKKLINEKKEDGKVFWQNLAGYKRQEALRPYLSSEEDRKKGKKFARYQLGDLLLHLEKKHGEDWGKVYDEAWERIDKKVEGLSKHIKLEEERRSEDAQSKAALTDWLRAKASFVIEGLKEADKDEFCRCELKLQKWYGDLRGKPFAIEAENSILDISGFSKQYNCAFIWQKDGVKKLNLYLIINYFKGGKLRFKKIKPEAFEANRFYTVINKKSGEIVPMEVNFNFDDPNLIILPLAFGKRQGREFIWNDLLSLETGSLKLANGRVIEKTLYNRRTRQDEPALFVALTFERREVLDSSNIKPMNLIGVDRGENIPAVIALTDPEGCPLSRFKDSLGNPTHILRIGESYKEKQRTIQAKKEVEQRRAGGYSRKYASKAKNLADDMVRNTARDLLYYAVTQDAMLIFENLSRGFGRQGKRTFMAERQYTRMEDWLTAKLAYEGLPSKTYLSKTLAQYTSKTCSNCGFTITSADYDRVLEKLKKTATGWMTTINGKELKVEGQITYYNRYKRQNVVKDLSVELDRLSEESVNNDISSWTKGRSGEALSLLKKRFSHRPVQEKFVCLNCGFETHADEQAALNIARSWLFLRSQEYKKYQTNKTTGNTDKRAFVETWQSFYRKKLKEVWKPAV

SEQ ID NO: 14242 - protein, 978 aa, synthetic construct
QEIKRINKIRRRLVKDSNTKKAGKTGPMKTLLVRVMTPDLRERLENLRKKPENIPQPISNTSRANLNKLLTDYTEMKKAILHVYWEEFQKDPVGLMSRVAQPASKKIDQNKLKPEMDEKGNLTTAGFACSQCGQPLFVYKLEQVSEKGKAYTNYFGRCNVAEHEKLILLAQLKPEKDSDEAVTYSLGKFGQRALDFYSIHVTKESTHPVKPLAQIAGNRYASGPVGKALSDACMGTIASFLSKYQDIIIEHQKVVKGNQKRLESLRELAGKENLEYPSVTLPPQPHTKEGVDAYNEVIARVRTWVNLNLWQKLKLSRDDAKPLLRLKGFPSFPLVERQANEVDWWDMVCNVKKLINEKKEDGKVFWQNLAGYKRQEALRPYLSSEEDRKKGKKFARTQLGDLLLHLEKKHGEDWGKVYDEAWERIDKKVEGLSKHIKLEEERRSEDAQSKAALTDWLRAKASFVIEGLKEADKDEFCRCELKLQKWYGDLRGKPFAIEAENSILDISGFSKQYNCAFIWQKDGVKKLNLYLIINYFKGGKLRFKKIKPEAFEANRFYTVINKKSGEIVPMEVNFNFDDPNLIILPLAFGKRQGREFIWNDLLSLETGSLKLANGRVIEKTLYNRRTRQDEPALFVALTFERREVLDSSNIKPMNLIGVDRGENIPAVIALTDPEGCPLSRFKDSLGNPTHILRIGESYKEKQRTIQAKKEVEQRRAGGYSRKYASKAKNLADDMVRNTARDLLYYAVTQDAMLIFENLSRGFGRQGKRTFMAERQYTRMEDWLTAKLAYEGLPSKTYLSKTLAQYTSKTCSNCGFTITSADYDRVLEKLKKTATGWMTTINGKELKVEGQITYYNRYKRQNVVKDLSVELDRLSEESVNNDISSWTKGRSGEALSLLKKRFSHRPVQEKFVCLNCGFETHADEQAALNIARSWLFLRSQEYKKYQTNKTTGNTDKRAFVETWQSFYRKKLKEVWKPAV

SEQ ID NO: 14243 - protein, 978 aa, synthetic construct
QEIKRINKIRRRLVKDSNTKKAGKTGPMKTLLVRVMTPDLRERLENLRKKPENIPQPISNTSRANLNKLLTDYTEMKKAILHVYWEEFQKDPVGLMSRVAQPASKKIDQNKLKPEMDEKGNLTTAGFACSQCGQPLFVYKLEQVSEKGKAYTNYFGRCNVAEHEKLILLAQLKPEKDSDEAVTYSLGKFGQRALDFYSIHVTKESTHPVKPLAQIAGNRYASGPVGKALSDACMGTIASFLSKYQDIIIEHQKVVKGNQKRLESLRELAGKENLEYPSVTLPPQPHTKEGVDAYNEVIARVRTWVNLNLWQKLKLSRDDAKPLLRLKGFPSFPLVERQANEVDWWDMVCNVKKLINEKKEDGKVFWQNLAGYKRQEALRPYLSSEEDRKKGKKFARYQLGDLLLHLEKKHGEDWGKVYDEAWERIDKKVEGLSKHIKLEEERRSEDAQSKAALTDWLRAKASFVIEGLKEADKDEFCRCELKLQKWYGDLRGKPFAIEAENSILDISGFSKQYNCAFIWQKDGVKKLNLYLIINYFKGGKLRFKKIKPEAFEANRFYTVINKKSGEIVPMEVNFNFDDPNLIILPLAFGKRQGREFIWNDLLSLETGSLKLANGRVIEKTLYNRRTRQDEPALFVALTFERREVLDSSNIKPMNLIGVDRGENIPAVIALTDPEGCPLSRFKDSLGNPTHILRIGESYKEKQRTIQAKKEVEQRRAGGYSRKYASKAKNLADDMVRNTARDLLYYAVTQDAMLIFENLSRGFGRQGKRTFMAERQYTRMEDWLTAKLAYEGLPSKTYLSKTLAQYTSKTCSNCGFTITSADYDRMLEKLKKTATGWMTTINGKELKVEGQITYYNRYKRQNVVKDLSVELDRLSEESVNNDISSWTKGRSGEALSLLKKRFSHRPVQEKFVCLNCGFETHADEQAALNIARSWLFLRSQEYKKYQTNKTTGNTDKRAFVETWQSFYRKKLKEVWKPAV

SEQ ID NO: 14244 - protein, 978 aa, synthetic construct
QEIKRINKIRRRLVKDSNTKKAGKTGPMKTLLVRVMTPDLRERLENLRKKPENIPQPISNTSRANLNKLLTDYTEMKKAILHVYWEEFQKDPVGLMSRVAQPASKKIDQNKLKPEMDEKGNLTTAGFACSQCGQPLFVYKLEQVSEKGKAYTNYFGRCNVAEHEKLILLAQLKPEKDSDEAVTYSLGKFGQRALDFYSIHVTKESTHPVKPLAQIAGNRYASGPVGKALSDACMGTIASFLSKYQDIIIEHQKVVKGNQKRLESLRELAGKENLEYPSVTLPPQPHTKEGVDAYNEVIARVRTWVNLNLWQKLKLSRDDAKPLLRLKGFPSFPLVERQANEVDWWDMVCNVKKLINEKKEDGKVFWQNLAGYKRQEALRPYLSSEEDRKKGKKFARYQLGDLLLHLEKKHGEDWGKVYDEAWERIDKKVEGLSKHIKLEEERRSEDAQSKAALTDWLRAKASFVIEGLKEADKDEFCRCELKLQKWYGDLRGKPFAIEAENSILDISGFSKQYNCAFIWQKDGVKKLNLYLIINYFKGGKLRFKKIKPEAFEANRFYTVINKKSGEIVPMEVNFNFDDPNLIILPLAFGKRQGREFIWNDLLSLETGSLKLANGRVIEKTLYNRRTRQDEPALFVALTFERREVLDSSNIKPMNLIGVDRGENIPAVIALTDPEGCPLSRFKDSLGNPTHILRIGESYKEKQRTIQAKKEVEQRRAGGYSRKYASKAKNLADDMVRNTARDLLYYAVTQDAMLIFENLSRGFGRQGKRTFMAERQYTRMEDWLTAKLAYEGLPSKTYLSKTLAQYTSKTCSNCGFTITSADYDRVLEKLKKTATGWMTTINGKELKVEGQITYYNRYKRQNVVKDLSVELDRLSEESVNNDISSWDKGRSGEALSLLKKRFSHRPVQEKFVCLNCGFETHADEQAALNIARSWLFLRSQEYKKYQTNKTTGNTDKRAFVETWQSFYRKKLKEVWKPAV

SEQ ID NO: 14245 - protein, 978 aa, synthetic construct
QEIKRINKIRRRLVKDSNTKKAGKTGPMKTLLVRVMTPDLRERLENLRKKPENIPQPISNTSRANLNKLLTDYTEMKKAILHVYWEEFQKDPVGLMSRVAQPASKKIDQNKLKPEMDEKGNLTTAGFACSQCGQPLFVYKLEQVSEKGKAYTNYFGRCNVAEHEKLILLAQLKPEKDSDEAVTYSLGKFGQRALDFYSIHVTKESTHPVKPLAQIAGNRYASGPVGKALSDACMGTIASFLSKYQDIIIEHQKVVKGNQKRLESLRELAGKENLEYPSVTLPPQPHTKEGVDAYNEVIARVRTWVNLNLWQKLKLSRDDAKPLLRLKGFPSFPLVERQANEVDWWDMVCNVKKLINEKKEDGKVFWQNLAGYKRQEALRPYLSSEEDRKKGKKFARYQLGDLLLHLEKKHGEDWGKVYDEAWERIDKKVEGLSKHIKLEEERRSEDAQSKAALTDWLRAKASFVIEGLKEADKDEFCRCELKLQKWYGDLRGKPFAIEAENSILDISGFSKQYNCAFIWQKDGVKKLNLYLIINYFKGGKLRFKKIKPEAFEANRFYTVINKKSGEIVPMEVNFNFDDPNLIILPLAFGKRQGREFIWNDLLSLETGSLKLANGRVIEKTLYNRRTRQDEPALFVALTFERREVLDSSNIKPMNLIGVDRGENIPAVIALTDPEGCPLSRFKDSLGNPTHILRIGESYKEKQRTIQAKKEVEQRRAGGYSRKYASKAKNLADDMVRNTARDLLYYAVTQDAMLIFENLSRGFGRQGKRTFMAERQYTRMEDWLTAKLAYEGLPSKTYLSKTLAQYTSKTCSNCGFTITSADYDRVLEKLKKTATGWMTTINGKELKVEGQITYYNRYKRQNVVKDLSVELDRLSEESVNNDISSWTKGRQGEALSLLKKRFSHRPVQEKFVCLNCGFETHADEQAALNIARSWLFLRSQEYKKYQTNKTTGNTDKRAFVETWQSFYRKKLKEVWKPAV

SEQ ID NO: 14246 - protein, 978 aa, synthetic construct
QEIKRINGIRRRLVKDSNTKKAGKTGPMKTLLVPVMTPDLRERLENLRKKPENIPQPISNTSRANLNKLLTDYTEMKKAILHVYWEEFQKDPVGLMSRVAQPASKKIDQNKLKPEMDEKGNLTTAGFACSQCGQPLFVYKLEQVSEKGKAYTNYFGRCNVAEHEKLILLAQLKPEKDSDEAVTYSLGKFGQRALDFYSIHVTKESTHPVKPLAQIAGNRYASGPVGKALSDACMGTIASFLSKYQDIIIEHQKVVKGNQKRLESLRELAGKENLEYPSVTLPPQPHTKEGVDAYNEVIARVRMWVNLNLWQKLKLSRDDAKPLLRLKGFPSFPLVERQANEVDWWDMVCNVKKLINEKKEDGKVFWQNLAGYKRQEALRPYLSSEEDRKKGKKFARYQLGDLLLHLEKKHGEDWGKVYDEAWERIDKKVEGLSKHIKLEEERRSEDAQSKAALTDWLRAKASFVIEGLKEADKDEFCRCELKLQKWYGDLRGKPFAIEAENSILDISGFSKQYNCAFIWQKDGVKKLNLYLIINYFKGGKLRFKKIKPEAFEANRFYTVINKKSGEIVPMEVNFNFDDPNLIILPLAFGKRQGREFIWNDLLSLETGSLKLANGRVIEKTLYNRRTRQDEPALFVALTFERREVLDSSNIKPMNLIGVDRGENIPAVIALTDPEGCPLSRFKDSLGNPTHILRIGESYKEKQRTIQAKKEVEQRRAGGYSRKYASKAKNLADDMVRNTARDLLYYAVTQDAMLIFENLSRGFGRQGKRTFMAERQYTRMEDWLTAKLAYEGLPSKTYLSKTLAQYTSKTCSNCGFTITSADYDRVLEKLKKTATGWMTTINGKELKVEGQITYYNRYKRQNVVKDLSVELDRLSEESVNNDISSWTKGRSGEALSLLKKRFSHRPVQEKFVCLNCGFETHADEQAALNIARSWLFLRSQEYKKYQTNKTTGNTDKRAFVETWQSFYRKKLKEVWKPAV

SEQ ID NO: 14247 - protein, 982 aa, synthetic construct
QEIGKRINKIRRRLVKDSNTKKAGKTRKTGPMKTLLVRVMTPDLRERLENLRKKPENIPQPISNTSRANLNKLLTDYTEMKKAILHVYWEEFQKDPVGLMSRVAQPASKKIDQNKLKPEMDEKGNLTTAGFACSQCGQPLFVYKLEQVSEKGKAYTNYFGRCNVAEHEKLILLAQLKPEKDSDEAVTYSLGKFGQRALDFYSIHVTKESTHPVKPLAQIAGNRYASGPVGKALSDACMGTIASFLSKYQDIIIEHQKVVKGNQKRLESLRELAGKENLEYPSVTLPPQPHTKEGVDAYNEVIARVRMWVNLNLWQKLKLSRDDAKPLLRLKGFPSFPLVERQANEVDWWDMVCNVKKLINEKKEDGKVFWQNLAGYKRQEALRPYLSSEEDRKKGKKFARYQLGDLLLHLEKKHGEDWGKVYDEAWERIDKKVEGLSKHIKLEEERRSEDAQSKAALTDWLRAKASFVIEGLKEADKDEFCRCELKLQKWYGDLRGKPFAIEAENSILDISGFSKQYNCAFIWQKDGVKKLNLYLIINYFKGGKLRFKKIKPEAFEANRFYTVINKKSGEIVPMEVNFNFDDPNLIILPLAFGKRQGREFIWNDLLSLETGSLKLANGRVIEKTLYNRRTRQDEPALFVALTFERREVLDSSNIKPMNLIGVDRGENIPAVIALTDPEGCPLSRFKDSLGNPTHILRIGESYKEKQRTIQAKKEVEQRRAGGYSRKYASKAKNLADDMVRNTARDLLYYAVTQDAMLIFENLSRGFGRQGKRTFMAERQYTRMEDWLTAKLAYEGLPSKTYLSKTLAQYTSKTCSNCGFTITSADYDRVLEKLKKTATGWMTTINGKELKVEGQITYYNRYKRQNVVKDLSVELDRLSEESVNNDISSWTKGRSGEALSLLKKRFSHRPVQEKFVCLNCGFETHADEQAALNIARSWLFLRSQEYKKYQTNKTTGNTDKRAFVETWQSFYRKKLKEVWKPAV

SEQ ID NO: 14248 - protein, 978 aa, synthetic construct
QEGKRINGIRRRLVKDSNTKKAGKTGPMKTLLVRVMTPDLRERLENLRKKPENIPQPISNTSRANLNKLLTDYTEMKKAILHVYWEEFQKDPVGLMSRVAQPASKKIDQNKLKPEMDEKGNLTTAGFACSQCGQPLFVYKLEQVSEKGKAYTNYFGRCNVAEHEKLILLAQLKPEKDSDEAVTYSLGKFGQRALDFYSIHVTKESTHPVKPLAQIAGNRYASGPVGKALSDACMGTIASFLSKYQDIIIEHQKVVKGNQKRLESLRELAGKENLEYPSVTLPPQPHTKEGVDAYNEVIARVRMWVNLNLWQKLKLSRDDAKPLLRLKGFPSFPLVERQANEVDWWDMVCNVKKLINEKKEDGKVFWQNLAGYKRQEALRPYLSSEEDRKKGKKFARYQLGDLLLHLEKKHGEDWGKVYDEAWERIDKKVEGLSKHIKLEEERRSEDAQSKAALTDWLRAKASFVIEGLKEADKDEFCRCELKLQKWYGDLRGKPFAIEAENSILDISGFSKQYNCAFIWQKDGVKKLNLYLIINYFKGGKLRFKKIKPEAFEANRFYTVINKKSGEIVPMEVNFNFDDPNLIILPLAFGKRQGREFIWNDLLSLETGSLKLANGRVIEKTLYNRRTRQDEPALFVALTFERREVLDSSNIKPMNLIGVDRGENIPAVIALTDPEGCPLSRFKDSLGNPTHILRIGESYKEKQRTIQAKKEVEQRRAGGYSRKYASKAKNLADDMVRNTARDLLYYAVTQDAMLIFENLSRGFGRQGKRTFMAERQYTRMEDWLTAKLAYEGLPSKTYLSKTLAQYTSKTCSNCGFTITSADYDRVLEKLKKTATGWMTTINGKELKVEGQITYYNRYKRQNVVKDLSVELDRLSEESVNNDISSWTKGRSGEALSLLKKRFSHRPVQEKFVCLNCGFETHADEQAALNIARSWLFLRSQEYKKYQTNKTTGNTDKRAFVETWQSFYRKKLKEVWKPAV

SEQ ID NO: 14249 - protein, 978 aa, synthetic construct
QEIKRINKIRRRLVKDSNTKKAGKTGPMKTLLVRVMTPDLRERLENLRKKPENIPQPISNTSRANLNKLLTDYTEMKKAILHVYWEEFQKDPVGLMSRVAQPASKKIDQNKLKPEMDEKGNLTTAGFACSQCGQPLFVYKLEQVSEKGKAYTNYFGRCNVAEHEKLILLAQLKPEKDSDEAVTYSLGKFGQRALDFYSIHVTKESTHPVKPLAQIAGNRYASGPVGKALSDACMGTIASFLSKYQDIIIEHQKVVKGNQKRLESLRELAGKENLEYPSVTLPPQPHTKEGVDAYNEVIARVRMWVNLNLWQKLKLSRDDAKPLLRLKGFPSFPLVERQANEVDWWDMVCNVKKLINEKKEDGKVFWQNLAGYKRQEALRPYLSSEEDRKKGKKFARTQLGDLLLHLEKKHGEDWGKVYDEAWERIDKKVEGLSKHIKLEEERRSEDAQSKAALTDWLRAKASFVIEGLKEADKDEFCRCELKLQKWYGDLRGKPFAIEAENSILDISGFSKQYNCAFIWQKDGVKKLNLYLIINYFKGGKLRFKKIKPEAFEANRFYTVINKKSGEIVPMEVNFNFDDPNLIILPLAFGKRQGREFIWNDLLSLETGSLKLANGRVIEKTLYNRRTRQDEPALFVALTFERREVLDSSNIKPMNLIGVDRGENIPAVIALTDPEGCPLSRFKDSLGNPTHILRIGESYKEKQRTIQAKKEVEQRRAGGYSRKYASKAKNLADDMVRNTARDLLYYAVTQDAMLIFENLSRGFGRQGKRTFMAERQYTRMEDWLTAKLAYEGLPSKTYLSKTLAQYTSKTCSNCGFTITSADYDRMLEKLKKTATGWMTTINGKELKVEGQITYYNRYKRQNVVKDLSVELDRLSEESVNNDISSWTKGRSGEALSLLKKRFSHRPVQEKFVCLNCGFETHADEQAALNIARSWLFLRSQEYKKYQTNKTTGNTDKRAFVETWQSFYRKKLKEVWKPAV

SEQ ID NO: 14250 - protein, 978 aa, synthetic construct
QEIKRINKIRRRLVKDSNTKKAGKTGPMKTLLVRVMTPDLRERLENLRKKPENIPQPISNTSRANLNKLLTDYTEMKKAILHVYWEEFQKDPVGLMSRVAQPASKKIDQNKLKPEMDEKGNLTTAGFACSQCGQPLFVYKLEQVSEKGKAYTNYFGRCNVAEHEKLILLAQLKPEKDSDEAVTYSLGKFGQRALDFYSIHVTKESTHPVKPLAQIAGNRYASGPVGKALSDACMGTIASFLSKYQDIIIEHQKVVKGNQKRLESLRELAGKENLEYPSVTLPPQPHTKEGVDAYNEVIARVRMWVNLNLWQKLKLSRDDAKPLLRLKGFPSFPLVERQANEVDWWDMVCNVKKLINEKKEDGKVFWQNLAGYKRQEALRPYLSSEEDRKKGKKFARTQLGDLLLHLEKKHGEDWGKVYDEAWERIDKKVEGLSKHIKLEEERRSEDAQSKAALTDWLRAKASFVIEGLKEADKDEFCRCELKLQKWYGDLRGKPFAIEAENSILDISGFSKQYNCAFIWQKDGVKKLNLYLIINYFKGGKLRFKKIKPEAFEANRFYTVINKKSGEIVPMEVNFNFDDPNLIILPLAFGKRQGREFIWNDLLSLETGSLKLANGRVIEKTLYNRRTRQDEPALFVALTFERREVLDSSNIKPMNLIGVDRGENIPAVIALTDPEGCPLSRFKDSLGNPTHILRIGESYKEKQRTIQAKKEVEQRRAGGYSRKYASKAKNLADDMVRNTARDLLYYAVTQDAMLIFENLSRGFGRQGKRTFMAERQYTRMEDWLTAKLAYEGLPSKTYLSKTLAQYTSKTCSNCGFTITSADYDRVLEKLKKTATGWMTTINGKELKVEGQITYYNRYKRQNVVKDLSVELDRLSEESVNNDISSWDKGRSGEALSLLKKRFSHRPVQEKFVCLNCGFETHADEQAALNIARSWLFLRSQEYKKYQTNKTTGNTDKRAFVETWQSFYRKKLKEVWKPAV

SEQ ID NO: 14251 - protein, 978 aa, synthetic construct
QEIKRINKIRRRLVKDSNTKKAGKTGPMKTLLVRVMTPDLRERLENLRKKPENIPQPISNTSRANLNKLLTDYTEMKKAILHVYWEEFQKDPVGLMSRVAQPASKKIDQNKLKPEMDEKGNLTTAGFACSQCGQPLFVYKLEQVSEKGKAYTNYFGRCNVAEHEKLILLAQLKPEKDSDEAVTYSLGKFGQRALDFYSIHVTKESTHPVKPLAQIAGNRYASGPVGKALSDACMGTIASFLSKYQDIIIEHQKVVKGNQKRLESLRELAGKENLEYPSVTLPPQPHTKEGVDAYNEVIARVRMWVNLNLWQKLKLSRDDAKPLLRLKGFPSFPLVERQANEVDWWDMVCNVKKLINEKKEDGKVFWQNLAGYKRQEALRPYLSSEEDRKKGKKFARTQLGDLLLHLEKKHGEDWGKVYDEAWERIDKKVEGLSKHIKLEEERRSEDAQSKAALTDWLRAKASFVIEGLKEADKDEFCRCELKLQKWYGDLRGKPFAIEAENSILDISGFSKQYNCAFIWQKDGVKKLNLYLIINYFKGGKLRFKKIKPEAFEANRFYTVINKKSGEIVPMEVNFNFDDPNLIILPLAFGKRQGREFIWNDLLSLETGSLKLANGRVIEKTLYNRRTRQDEPALFVALTFERREVLDSSNIKPMNLIGVDRGENIPAVIALTDPEGCPLSRFKDSLGNPTHILRIGESYKEKQRTIQAKKEVEQRRAGGYSRKYASKAKNLADDMVRNTARDLLYYAVTQDAMLIFENLSRGFGRQGKRTFMAERQYTRMEDWLTAKLAYEGLPSKTYLSKTLAQYTSKTCSNCGFTITSADYDRVLEKLKKTATGWMTTINGKELKVEGQITYYNRYKRQNVVKDLSVELDRLSEESVNNDISSWTKGRQGEALSLLKKRFSHRPVQEKFVCLNCGFETHADEQAALNIARSWLFLRSQEYKKYQTNKTTGNTDKRAFVETWQSFYRKKLKEVWKPAV

SEQ ID NO: 14252 - protein, 979 aa, synthetic construct
QEIKRINKIRRRLVKDSNTKKAGKTRGPMKTLLVPVMTPDLRERLENLRKKPENIPQPISNTSRANLNKLLTDYTEMKKAILHVYWEEFQKDPVGLMSRVAQPASKKIDQNKLKPEMDEKGNLTTAGFACSQCGQPLFVYKLEQVSEKGKAYTNYFGRCNVAEHEKLILLAQLKPEKDSDEAVTYSLGKFGQRALDFYSIHVTKESTHPVKPLAQIAGNRYASGPVGKALSDACMGTIASFLSKYQDIIIEHQKVVKGNQKRLESLRELAGKENLEYPSVTLPPQPHTKEGVDAYNEVIARVRMWVNLNLWQKLKLSRDDAKPLLRLKGFPSFPLVERQANEVDWWDMVCNVKKLINEKKEDGKVFWQNLAGYKRQEALRPYLSSEEDRKKGKKFARYQLGDLLLHLEKKHGEDWGKVYDEAWERIDKKVEGLSKHIKLEEERRSEDAQSKAALTDWLRAKASFVIEGLKEADKDEFCRCELKLQKWYGDLRGKPFAIEAENSILDISGFSKQYNCAFIWQKDGVKKLNLYLIINYFKGGKLRFKKIKPEAFEANRFYTVINKKSGEIVPMEVNFNFDDPNLIILPLAFGKRQGREFIWNDLLSLETGSLKLANGRVIEKTLYNRRTRQDEPALFVALTFERREVLDSSNIKPMNLIGVDRGENIPAVIALTDPEGCPLSRFKDSLGNPTHILRIGESYKEKQRTIQAKKEVEQRRAGGYSRKYASKAKNLADDMVRNTARDLLYYAVTQDAMLIFENLSRGFGRQGKRTFMAERQYTRMEDWLTAKLAYEGLPSKTYLSKTLAQYTSKTCSNCGFTITSADYDRVLEKLKKTATGWMTTINGKELKVEGQITYYNRYKRQNVVKDLSVELDRLSEESVNNDISSWTKGRSGEALSLLKKRFSHRPVQEKFVCLNCGFETHADEQAALNIARSWLFLRSQEYKKYQTNKTTGNTDKRAFVETWQSFYRKKLKEVWKPAV

SEQ ID NO: 14253 - protein, 979 aa, synthetic construct
QEIKRINGIRRRLVKDSNTKKAGKTRGPMKTLLVRVMTPDLRERLENLRKKPENIPQPISNTSRANLNKLLTDYTEMKKAILHVYWEEFQKDPVGLMSRVAQPASKKIDQNKLKPEMDEKGNLTTAGFACSQCGQPLFVYKLEQVSEKGKAYTNYFGRCNVAEHEKLILLAQLKPEKDSDEAVTYSLGKFGQRALDFYSIHVTKESTHPVKPLAQIAGNRYASGPVGKALSDACMGTIASFLSKYQDIIIEHQKVVKGNQKRLESLRELAGKENLEYPSVTLPPQPHTKEGVDAYNEVIARVRMWVNLNLWQKLKLSRDDAKPLLRLKGFPSFPLVERQANEVDWWDMVCNVKKLINEKKEDGKVFWQNLAGYKRQEALRPYLSSEEDRKKGKKFARYQLGDLLLHLEKKHGEDWGKVYDEAWERIDKKVEGLSKHIKLEEERRSEDAQSKAALTDWLRAKASFVIEGLKEADKDEFCRCELKLQKWYGDLRGKPFAIEAENSILDISGFSKQYNCAFIWQKDGVKKLNLYLIINYFKGGKLRFKKIKPEAFEANRFYTVINKKSGEIVPMEVNFNFDDPNLIILPLAFGKRQGREFIWNDLLSLETGSLKLANGRVIEKTLYNRRTRQDEPALFVALTFERREVLDSSNIKPMNLIGVDRGENIPAVIALTDPEGCPLSRFKDSLGNPTHILRIGESYKEKQRTIQAKKEVEQRRAGGYSRKYASKAKNLADDMVRNTARDLLYYAVTQDAMLIFENLSRGFGRQGKRTFMAERQYTRMEDWLTAKLAYEGLPSKTYLSKTLAQYTSKTCSNCGFTITSADYDRVLEKLKKTATGWMTTINGKELKVEGQITYYNRYKRQNVVKDLSVELDRLSEESVNNDISSWTKGRSGEALSLLKKRFSHRPVQEKFVCLNCGFETHADEQAALNIARSWLFLRSQEYKKYQTNKTTGNTDKRAFVETWQSFYRKKLKEVWKPAV

SEQ ID NO: 14254 - protein, 979 aa, synthetic construct
QEIGKRINGIRRRLVKDSNTKKAGKTGPMKTLLVRVMTPDLRERLENLRKKPENIPQPISNTSRANLNKLLTDYTEMKKAILHVYWEEFQKDPVGLMSRVAQPASKKIDQNKLKPEMDEKGNLTTAGFACSQCGQPLFVYKLEQVSEKGKAYTNYFGRCNVAEHEKLILLAQLKPEKDSDEAVTYSLGKFGQRALDFYSIHVTKESTHPVKPLAQIAGNRYASGPVGKALSDACMGTIASFLSKYQDIIIEHQKVVKGNQKRLESLRELAGKENLEYPSVTLPPQPHTKEGVDAYNEVIARVRMWVNLNLWQKLKLSRDDAKPLLRLKGFPSFPLVERQANEVDWWDMVCNVKKLINEKKEDGKVFWQNLAGYKRQEALRPYLSSEEDRKKGKKFARYQLGDLLLHLEKKHGEDWGKVYDEAWERIDKKVEGLSKHIKLEEERRSEDAQSKAALTDWLRAKASFVIEGLKEADKDEFCRCELKLQKWYGDLRGKPFAIEAENSILDISGFSKQYNCAFIWQKDGVKKLNLYLIINYFKGGKLRFKKIKPEAFEANRFYTVINKKSGEIVPMEVNFNFDDPNLIILPLAFGKRQGREFIWNDLLSLETGSLKLANGRVIEKTLYNRRTRQDEPALFVALTFERREVLDSSNIKPMNLIGVDRGENIPAVIALTDPEGCPLSRFKDSLGNPTHILRIGESYKEKQRTIQAKKEVEQRRAGGYSRKYASKAKNLADDMVRNTARDLLYYAVTQDAMLIFENLSRGFGRQGKRTFMAERQYTRMEDWLTAKLAYEGLPSKTYLSKTLAQYTSKTCSNCGFTITSADYDRVLEKLKKTATGWMTTINGKELKVEGQITYYNRYKRQNVVKDLSVELDRLSEESVNNDISSWTKGRSGEALSLLKKRFSHRPVQEKFVCLNCGFETHADEQAALNIARSWLFLRSQEYKKYQTNKTTGNTDKRAFVETWQSFYRKKLKEVWKPAV

SEQ ID NO: 14255 - protein, 979 aa, synthetic construct
QEGGKRINKIRRRLVKDSNTKKAGKTGPMKTLLVRVMTPDLRERLENLRKKPENIPQPISNTSRANLNKLLTDYTEMKKAILHVYWEEFQKDPVGLMSRVAQPASKKIDQNKLKPEMDEKGNLTTAGFACSQCGQPLFVYKLEQVSEKGKAYTNYFGRCNVAEHEKLILLAQLKPEKDSDEAVTYSLGKFGQRALDFYSIHVTKESTHPVKPLAQIAGNRYASGPVGKALSDACMGTIASFLSKYQDIIIEHQKVVKGNQKRLESLRELAGKENLEYPSVTLPPQPHTKEGVDAYNEVIARVRMWVNLNLWQKLKLSRDDAKPLLRLKGFPSFPLVERQANEVDWWDMVCNVKKLINEKKEDGKVFWQNLAGYKRQEALRPYLSSEEDRKKGKKFARYQLGDLLLHLEKKHGEDWGKVYDEAWERIDKKVEGLSKHIKLEEERRSEDAQSKAALTDWLRAKASFVIEGLKEADKDEFCRCELKLQKWYGDLRGKPFAIEAENSILDISGFSKQYNCAFIWQKDGVKKLNLYLIINYFKGGKLRFKKIKPEAFEANRFYTVINKKSGEIVPMEVNFNFDDPNLIILPLAFGKRQGREFIWNDLLSLETGSLKLANGRVIEKTLYNRRTRQDEPALFVALTFERREVLDSSNIKPMNLIGVDRGENIPAVIALTDPEGCPLSRFKDSLGNPTHILRIGESYKEKQRTIQAKKEVEQRRAGGYSRKYASKAKNLADDMVRNTARDLLYYAVTQDAMLIFENLSRGFGRQGKRTFMAERQYTRMEDWLTAKLAYEGLPSKTYLSKTLAQYTSKTCSNCGFTITSADYDRVLEKLKKTATGWMTTINGKELKVEGQITYYNRYKRQNVVKDLSVELDRLSEESVNNDISSWTKGRSGEALSLLKKRFSHRPVQEKFVCLNCGFETHADEQAALNIARSWLFLRSQEYKKYQTNKTTGNTDKRAFVETWQSFYRKKLKEVWKPAV

SEQ ID NO: 14256 - protein, 978 aa, synthetic construct
QEIKRINKIRRRLVKDSNTKKAGKTGPMKTLLVRVMTPDLRERLENLRKKPENIPQPISNTSRANLNKLLTDYTEMKKAILHVYWEEFQKDPVGLMSRVAQPASKKIDQNKLKPEMDEKGNLTTAGFACSQCGQPLFVYKLEQVSEKGKAYTNYFGRCNVAEHEKLILLAQLKPEKDSDEAVTYSLGKFGQRALDFYSIHVTKESTHPVKPLAQIAGNRYASGPVGKALSDACMGTIASFLSKYQDIIIEHQKVVKGNQKRLESLRELAGKENLEYPSVTLPPQPHTKEGVDAYNEVIARVRMWVNLNLWQKLKLSRDDAKPLLRLKGFPSFPLVERQANEVDWWDMVCNVKKLINEKKEDGKVFWQNLAGYKRQEALRPYLSSEEDRKKGKKFARYQLGDLLLHLEKKHGEDWGKVYDEAWERIDKKVEGLSKHIKLEEERRSEDAQSKAALTDWLRAKASFVIEGLKEADKDEFCRCELKLQKWYGDLRGKPFAIEAENSILDISGFSKQYNCAFIWQKDGVKKLNLYLIINYFKGGKLRFKKIKPEAFEANRFYTVINKKSGEIVPMEVNFNFDDPNLIILPLAFGKRQGREFIWNDLLSLETGSLKLANGRVIEKTLYNRRTRQDEPALFVALTFERREVLDSSNIKPMNLIGVDRGENIPAVIALTDPEGCPLSRFKDSLGNPTHILRIGESYKEKQRTIQAKKEVEQRRAGGYSRKYASKAKNLADDMVRNTARDLLYYAVTQDAMLIFENLSRGFGRQGKRTFMAERQYTRMEDWLTAKLAYEGLPSKTYLSKTLAQYTSKTCSNCGFTITSADYDRMLEKLKKTATGWMTTINGKELKVEGQITYYNRYKRQNVVKDLSVELDRLSEESVNNDISSWDKGRSGEALSLLKKRFSHRPVQEKFVCLNCGFETHADEQAALNIARSWLFLRSQEYKKYQTNKTTGNTDKRAFVETWQSFYRKKLKEVWKPAV

SEQ ID NO: 14257 - protein, 978 aa, synthetic construct
QEIKRINKIRRRLVKDSNTKKAGKTGPMKTLLVRVMTPDLRERLENLRKKPENIPQPISNTSRANLNKLLTDYTEMKKAILHVYWEEFQKDPVGLMSRVAQPASKKIDQNKLKPEMDEKGNLTTAGFACSQCGQPLFVYKLEQVSEKGKAYTNYFGRCNVAEHEKLILLAQLKPEKDSDEAVTYSLGKFGQRALDFYSIHVTKESTHPVKPLAQIAGNRYASGPVGKALSDACMGTIASFLSKYQDIIIEHQKVVKGNQKRLESLRELAGKENLEYPSVTLPPQPHTKEGVDAYNEVIARVRMWVNLNLWQKLKLSRDDAKPLLRLKGFPSFPLVERQANEVDWWDMVCNVKKLINEKKEDGKVFWQNLAGYKRQEALRPYLSSEEDRKKGKKFARYQLGDLLLHLEKKHGEDWGKVYDEAWERIDKKVEGLSKHIKLEEERRSEDAQSKAALTDWLRAKASFVIEGLKEADKDEFCRCELKLQKWYGDLRGKPFAIEAENSILDISGFSKQYNCAFIWQKDGVKKLNLYLIINYFKGGKLRFKKIKPEAFEANRFYTVINKKSGEIVPMEVNFNFDDPNLIILPLAFGKRQGREFIWNDLLSLETGSLKLANGRVIEKTLYNRRTRQDEPALFVALTFERREVLDSSNIKPMNLIGVDRGENIPAVIALTDPEGCPLSRFKDSLGNPTHILRIGESYKEKQRTIQAKKEVEQRRAGGYSRKYASKAKNLADDMVRNTARDLLYYAVTQDAMLIFENLSRGFGRQGKRTFMAERQYTRMEDWLTAKLAYEGLPSKTYLSKTLAQYTSKTCSNCGFTITSADYDRMLEKLKKTATGWMTTINGKELKVEGQITYYNRYKRQNVVKDLSVELDRLSEESVNNDISSWTKGRQGEALSLLKKRFSHRPVQEKFVCLNCGFETHADEQAALNIARSWLFLRSQEYKKYQTNKTTGNTDKRAFVETWQSFYRKKLKEVWKPAV

SEQ ID NO: 14258 - protein, 979 aa, synthetic construct
QEIGRINKIRRRLVKDSNTKKAGKTRGPMKTLLVRVMTPDLRERLENLRKKPENIPQPISNTSRANLNKLLTDYTEMKKAILHVYWEEFQKDPVGLMSRVAQPASKKIDQNKLKPEMDEKGNLTTAGFACSQCGQPLFVYKLEQVSEKGKAYTNYFGRCNVAEHEKLILLAQLKPEKDSDEAVTYSLGKFGQRALDFYSIHVTKESTHPVKPLAQIAGNRYASGPVGKALSDACMGTIASFLSKYQDIIIEHQKVVKGNQKRLESLRELAGKENLEYPSVTLPPQPHTKEGVDAYNEVIARVRMWVNLNLWQKLKLSRDDAKPLLRLKGFPSFPLVERQANEVDWWDMVCNVKKLINEKKEDGKVFWQNLAGYKRQEALRPYLSSEEDRKKGKKFARYQLGDLLLHLEKKHGEDWGKVYDEAWERIDKKVEGLSKHIKLEEERRSEDAQSKAALTDWLRAKASFVIEGLKEADKDEFCRCELKLQKWYGDLRGKPFAIEAENSILDISGFSKQYNCAFIWQKDGVKKLNLYLIINYFKGGKLRFKKIKPEAFEANRFYTVINKKSGEIVPMEVNFNFDDPNLIILPLAFGKRQGREFIWNDLLSLETGSLKLANGRVIEKTLYNRRTRQDEPALFVALTFERREVLDSSNIKPMNLIGVDRGENIPAVIALTDPEGCPLSRFKDSLGNPTHILRIGESYKEKQRTIQAKKEVEQRRAGGYSRKYASKAKNLADDMVRNTARDLLYYAVTQDAMLIFENLSRGFGRQGKRTFMAERQYTRMEDWLTAKLAYEGLPSKTYLSKTLAQYTSKTCSNCGFTITSADYDRVLEKLKKTATGWMTTINGKELKVEGQITYYNRYKRQNVVKDLSVELDRLSEESVNNDISSWTKGRSGEALSLLKKRFSHRPVQEKFVCLNCGFETHADEQAALNIARSWLFLRSQEYKKYQTNKTTGNTDKRAFVETWQSFYRKKLKEVWKPAV

SEQ ID NO: 14259 - protein, 978 aa, synthetic construct
QEIGRINKIRRRLVKDSNTKKAGKTGPMKTLLVRVMTPDLRERLENLRKKPENIPQPISNTSRANLNKLLTDYTEMKKAILHVYWEEFQKDPVGLMSRVAQPASKKIDQNKLKPEMDEKGNLTTAGFACSQCGQPLFVYKLEQVSEKGKAYTNYFGRCNVAEHEKLIKLAQLKPEKDSDEAVTYSLGKFGQRALDFYSIHVTKESTHPVKPLAQIAGNRYASGPVGKALSDACMGTIASFLSKYQDIIIEHQKVVKGNQKRLESLRELAGKENLEYPSVTLPPQPHTKEGVDAYNEVIARVRMWVNLNLWQKLKLSRDDAKPLLRLKGFPSFPLVERQANEVDWWDMVCNVKKLINEKKEDGKVFWQNLAGYKRQEALRPYLSSEEDRKKGKKFARYQLGDLLLHLEKKHGEDWGKVYDEAWERIDKKVEGLSKHIKLEEERRSEDAQSKAALTDWLRAKASFVIEGLKEADKDEFCRCELKLQKWYGDLRGKPFAIEAENSILDISGFSKQYNCAFIWQKDGVKKLNLYLIINYFKGGKLRFKKIKPEAFEANRFYTVINKKSGEIVPMEVNFNFDDPNLIILPLAFGKRQGREFIWNDLLSLETGSLKLANGRVIEKTLYNRRTRQDEPALFVALTFERREVLDSSNIKPMNLIGVDRGENIPAVIALTDPEGCPLSRFKDSLGNPTHILRIGESYKEKQRTIQAKKEVEQRRAGGYSRKYASKAKNLADDMVRNTARDLLYYAVTQDAMLIFENLSRGFGRQGKRTFMAERQYTRMEDWLTAKLAYEGLPSKTYLSKTLAQYTSKTCSNCGFTITSADYDRVLEKLKKTATGWMTTINGKELKVEGQITYYNRYKRQNVVKDLSVELDRLSEESVNNDISSWTKGRSGEALSLLKKRFSHRPVQEKFVCLNCGFETHADEQAALNIARSWLFLRSQEYKKYQTNKTTGNTDKRAFVETWQSFYRKKLKEVWKPAV

SEQ ID NO: 14260 - protein, 978 aa, synthetic construct
QEIGRINKIRRRLVKDSNTKKAGKTGPMKTLLVRVMTPDLRERLENLRKKPENIPQPISNTSRANLNKLLTDYTEMKKAILHVYWEEFQKDPVGLMSRVAQPASKKIDQNKLKPEMDEKGNLTTAGFACSQCGQPLFVYKLEQVSEKGKAYTNYFGRCNVAEHEKLILLDQLKPEKDSDEAVTYSLGKFGQRALDFYSIHVTKESTHPVKPLAQIAGNRYASGPVGKALSDACMGTIASFLSKYQDIIIEHQKVVKGNQKRLESLRELAGKENLEYPSVTLPPQPHTKEGVDAYNEVIARVRMWVNLNLWQKLKLSRDDAKPLLRLKGFPSFPLVERQANEVDWWDMVCNVKKLINEKKEDGKVFWQNLAGYKRQEALRPYLSSEEDRKKGKKFARYQLGDLLLHLEKKHGEDWGKVYDEAWERIDKKVEGLSKHIKLEEERRSEDAQSKAALTDWLRAKASFVIEGLKEADKDEFCRCELKLQKWYGDLRGKPFAIEAENSILDISGFSKQYNCAFIWQKDGVKKLNLYLIINYFKGGKLRFKKIKPEAFEANRFYTVINKKSGEIVPMEVNFNFDDPNLIILPLAFGKRQGREFIWNDLLSLETGSLKLANGRVIEKTLYNRRTRQDEPALFVALTFERREVLDSSNIKPMNLIGVDRGENIPAVIALTDPEGCPLSRFKDSLGNPTHILRIGESYKEKQRTIQAKKEVEQRRAGGYSRKYASKAKNLADDMVRNTARDLLYYAVTQDAMLIFENLSRGFGRQGKRTFMAERQYTRMEDWLTAKLAYEGLPSKTYLSKTLAQYTSKTCSNCGFTITSADYDRVLEKLKKTATGWMTTINGKELKVEGQITYYNRYKRQNVVKDLSVELDRLSEESVNNDISSWTKGRSGEALSLLKKRFSHRPVQEKFVCLNCGFETHADEQAALNIARSWLFLRSQEYKKYQTNKTTGNTDKRAFVETWQSFYRKKLKEVWKPAV

SEQ ID NO: 14261 - protein, 978 aa, synthetic construct
QEIGRINKIRRRLVKDSNTKKAGKTGPMKTLLVRVMTPDLRERLENLRKKPENIPQPISNTSRANLNKLLTDYTEMKKAILHVYWEEFQKDPVGLMSRVAQPASKKIDQNKLKPEMDEKGNLTTAGFACSQCGQPLFVYKLEQVSEKGKAYTNYFGRCNVAEHEKLILLAQLKPEKDSDEAVTYSLGKFGQRALDFYSIHVTKESTHPVKPLAQIAGNRYASGPVGKALSDACMGTIASFLSKYQDIIIEHQKVVKGNQKRLESLRELAGKENLEYPSVTLPPQPHTKEGVDAYNEVIARVRTWVNLNLWQKLKLSRDDAKPLLRLKGFPSFPLVERQANEVDWWDMVCNVKKLINEKKEDGKVFWQNLAGYKRQEALRPYLSSEEDRKKGKKFARYQLGDLLLHLEKKHGEDWGKVYDEAWERIDKKVEGLSKHIKLEEERRSEDAQSKAALTDWLRAKASFVIEGLKEADKDEFCRCELKLQKWYGDLRGKPFAIEAENSILDISGFSKQYNCAFIWQKDGVKKLNLYLIINYFKGGKLRFKKIKPEAFEANRFYTVINKKSGEIVPMEVNFNFDDPNLIILPLAFGKRQGREFIWNDLLSLETGSLKLANGRVIEKTLYNRRTRQDEPALFVALTFERREVLDSSNIKPMNLIGVDRGENIPAVIALTDPEGCPLSRFKDSLGNPTHILRIGESYKEKQRTIQAKKEVEQRRAGGYSRKYASKAKNLADDMVRNTARDLLYYAVTQDAMLIFENLSRGFGRQGKRTFMAERQYTRMEDWLTAKLAYEGLPSKTYLSKTLAQYTSKTCSNCGFTITSADYDRVLEKLKKTATGWMTTINGKELKVEGQITYYNRYKRQNVVKDLSVELDRLSEESVNNDISSWTKGRSGEALSLLKKRFSHRPVQEKFVCLNCGFETHADEQAALNIARSWLFLRSQEYKKYQTNKTTGNTDKRAFVETWQSFYRKKLKEVWKPAV

SEQ ID NO: 14262 - protein, 978 aa, synthetic construct
QEIGRINKIRRRLVKDSNTKKAGKTGPMKTLLVRVMTPDLRERLENLRKKPENIPQPISNTSRANLNKLLTDYTEMKKAILHVYWEEFQKDPVGLMSRVAQPASKKIDQNKLKPEMDEKGNLTTAGFACSQCGQPLFVYKLEQVSEKGKAYTNYFGRCNVAEHEKLILLAQLKPEKDSDEAVTYSLGKFGQRALDFYSIHVTKESTHPVKPLAQIAGNRYASGPVGKALSDACMGTIASFLSKYQDIIIEHQKVVKGNQKRLESLRELAGKENLEYPSVTLPPQPHTKEGVDAYNEVIARVRMWVNLNLWQKLKLSRDDAKPLLRLKGFPSFPLVERQANEVDWWDMVCNVKKLINEKKEDGKVFWQNLAGYKRQEALRPYLSSEEDRKKGKKFARTQLGDLLLHLEKKHGEDWGKVYDEAWERIDKKVEGLSKHIKLEEERRSEDAQSKAALTDWLRAKASFVIEGLKEADKDEFCRCELKLQKWYGDLRGKPFAIEAENSILDISGFSKQYNCAFIWQKDGVKKLNLYLIINYFKGGKLRFKKIKPEAFEANRFYTVINKKSGEIVPMEVNFNFDDPNLIILPLAFGKRQGREFIWNDLLSLETGSLKLANGRVIEKTLYNRRTRQDEPALFVALTFERREVLDSSNIKPMNLIGVDRGENIPAVIALTDPEGCPLSRFKDSLGNPTHILRIGESYKEKQRTIQAKKEVEQRRAGGYSRKYASKAKNLADDMVRNTARDLLYYAVTQDAMLIFENLSRGFGRQGKRTFMAERQYTRMEDWLTAKLAYEGLPSKTYLSKTLAQYTSKTCSNCGFTITSADYDRVLEKLKKTATGWMTTINGKELKVEGQITYYNRYKRQNVVKDLSVELDRLSEESVNNDISSWTKGRSGEALSLLKKRFSHRPVQEKFVCLNCGFETHADEQAALNIARSWLFLRSQEYKKYQTNKTTGNTDKRAFVETWQSFYRKKLKEVWKPAV

SEQ ID NO: 14263 - protein, 978 aa, synthetic construct
QEIGRINKIRRRLVKDSNTKKAGKTGPMKTLLVRVMTPDLRERLENLRKKPENIPQPISNTSRANLNKLLTDYTEMKKAILHVYWEEFQKDPVGLMSRVAQPASKKIDQNKLKPEMDEKGNLTTAGFACSQCGQPLFVYKLEQVSEKGKAYTNYFGRCNVAEHEKLILLAQLKPEKDSDEAVTYSLGKFGQRALDFYSIHVTKESTHPVKPLAQIAGNRYASGPVGKALSDACMGTIASFLSKYQDIIIEHQKVVKGNQKRLESLRELAGKENLEYPSVTLPPQPHTKEGVDAYNEVIARVRMWVNLNLWQKLKLSRDDAKPLLRLKGFPSFPLVERQANEVDWWDMVCNVKKLINEKKEDGKVFWQNLAGYKRQEALRPYLSSEEDRKKGKKFARYQLGDLLLHLEKKHGEDWGKVYDEAWERIDKKVEGLSKHIKLEEERRSEDAQSKAALTDWLRAKASFVIEGLKEADKDEFCRCELKLQKWYGDLRGKPFAIEAENSILDISGFSKQYNCAFIWQKDGVKKLNLYLIINYFKGGKLRFKKIKPEAFEANRFYTVINKKSGEIVPMEVNFNFDDPNLIILPLAFGKRQGREFIWNDLLSLETGSLKLANGRVIEKTLYNRRTRQDEPALFVALTFERREVLDSSNIKPMNLIGVDRGENIPAVIALTDPEGCPLSRFKDSLGNPTHILRIGESYKEKQRTIQAKKEVEQRRAGGYSRKYASKAKNLADDMVRNTARDLLYYAVTQDAMLIFENLSRGFGRQGKRTFMAERQYTRMEDWLTAKLAYEGLPSKTYLSKTLAQYTSKTCSNCGFTITSADYDRVLEKLKKTATGWMTTINGKELKVEGQITYYNRYKRQNVVKDLSVELDRLSEESVNNDISSWTKGRQGEALSLLKKRFSHRPVQEKFVCLNCGFETHADEQAALNIARSWLFLRSQEYKKYQTNKTTGNTDKRAFVETWQSFYRKKLKEVWKPAV

SEQ ID NO: 14264 - protein, 982 aa, synthetic construct
QEIKGRINKIRRRLVKDSNTKKAGKTRKTGPMKTLLVRVMTPDLRERLENLRKKPENIPQPISNTSRANLNKLLTDYTEMKKAILHVYWEEFQKDPVGLMSRVAQPASKKIDQNKLKPEMDEKGNLTTAGFACSQCGQPLFVYKLEQVSEKGKAYTNYFGRCNVAEHEKLILLAQLKPEKDSDEAVTYSLGKFGQRALDFYSIHVTKESTHPVKPLAQIAGNRYASGPVGKALSDACMGTIASFLSKYQDIIIEHQKVVKGNQKRLESLRELAGKENLEYPSVTLPPQPHTKEGVDAYNEVIARVRMWVNLNLWQKLKLSRDDAKPLLRLKGFPSFPLVERQANEVDWWDMVCNVKKLINEKKEDGKVFWQNLAGYKRQEALRPYLSSEEDRKKGKKFARYQLGDLLLHLEKKHGEDWGKVYDEAWERIDKKVEGLSKHIKLEEERRSEDAQSKAALTDWLRAKASFVIEGLKEADKDEFCRCELKLQKWYGDLRGKPFAIEAENSILDISGFSKQYNCAFIWQKDGVKKLNLYLIINYFKGGKLRFKKIKPEAFEANRFYTVINKKSGEIVPMEVNFNFDDPNLIILPLAFGKRQGREFIWNDLLSLETGSLKLANGRVIEKTLYNRRTRQDEPALFVALTFERREVLDSSNIKPMNLIGVDRGENIPAVIALTDPEGCPLSRFKDSLGNPTHILRIGESYKEKQRTIQAKKEVEQRRAGGYSRKYASKAKNLADDMVRNTARDLLYYAVTQDAMLIFENLSRGFGRQGKRTFMAERQYTRMEDWLTAKLAYEGLPSKTYLSKTLAQYTSKTCSNCGFTITSADYDRVLEKLKKTATGWMTTINGKELKVEGQITYYNRYKRQNVVKDLSVELDRLSEESVNNDISSWTKGRSGEALSLLKKRFSHRPVQEKFVCLNCGFETHADEQAALNIARSWLFLRSQEYKKYQTNKTTGNTDKRAFVETWQSFYRKKLKEVWKPAV

SEQ ID NO: 14265 - protein, 979 aa, synthetic construct
QEIKGRINKIRRRLVKDSNTKKAGKTGPMKTLLVRVMTPDLRERLENLRKKPENIPQPISNTSRANLNKLLTDYTEMKKAILHVYWEEFQKDPVGLMSRVAQPASKKIDQNKLKPEMDEKGNLTTAGFACSQCGQPLFVYKLEQVSEKGKAYTNYFGRCNVAEHEKLIKLAQLKPEKDSDEAVTYSLGKFGQRALDFYSIHVTKESTHPVKPLAQIAGNRYASGPVGKALSDACMGTIASFLSKYQDIIIEHQKVVKGNQKRLESLRELAGKENLEYPSVTLPPQPHTKEGVDAYNEVIARVRMWVNLNLWQKLKLSRDDAKPLLRLKGFPSFPLVERQANEVDWWDMVCNVKKLINEKKEDGKVFWQNLAGYKRQEALRPYLSSEEDRKKGKKFARYQLGDLLLHLEKKHGEDWGKVYDEAWERIDKKVEGLSKHIKLEEERRSEDAQSKAALTDWLRAKASFVIEGLKEADKDEFCRCELKLQKWYGDLRGKPFAIEAENSILDISGFSKQYNCAFIWQKDGVKKLNLYLIINYFKGGKLRFKKIKPEAFEANRFYTVINKKSGEIVPMEVNFNFDDPNLIILPLAFGKRQGREFIWNDLLSLETGSLKLANGRVIEKTLYNRRTRQDEPALFVALTFERREVLDSSNIKPMNLIGVDRGENIPAVIALTDPEGCPLSRFKDSLGNPTHILRIGESYKEKQRTIQAKKEVEQRRAGGYSRKYASKAKNLADDMVRNTARDLLYYAVTQDAMLIFENLSRGFGRQGKRTFMAERQYTRMEDWLTAKLAYEGLPSKTYLSKTLAQYTSKTCSNCGFTITSADYDRVLEKLKKTATGWMTTINGKELKVEGQITYYNRYKRQNVVKDLSVELDRLSEESVNNDISSWTKGRSGEALSLLKKRFSHRPVQEKFVCLNCGFETHADEQAALNIARSWLFLRSQEYKKYQTNKTTGNTDKRAFVETWQSFYRKKLKEVWKPAV

SEQ ID NO: 14266 - protein, 979 aa, synthetic construct
QEIKGRINKIRRRLVKDSNTKKAGKTGPMKTLLVRVMTPDLRERLENLRKKPENIPQPISNTSRANLNKLLTDYTEMKKAILHVYWEEFQKDPVGLMSRVAQPASKKIDQNKLKPEMDEKGNLTTAGFACSQCGQPLFVYKLEQVSEKGKAYTNYFGRCNVAEHEKLILLDQLKPEKDSDEAVTYSLGKFGQRALDFYSIHVTKESTHPVKPLAQIAGNRYASGPVGKALSDACMGTIASFLSKYQDIIIEHQKVVKGNQKRLESLRELAGKENLEYPSVTLPPQPHTKEGVDAYNEVIARVRMWVNLNLWQKLKLSRDDAKPLLRLKGFPSFPLVERQANEVDWWDMVCNVKKLINEKKEDGKVFWQNLAGYKRQEALRPYLSSEEDRKKGKKFARYQLGDLLLHLEKKHGEDWGKVYDEAWERIDKKVEGLSKHIKLEEERRSEDAQSKAALTDWLRAKASFVIEGLKEADKDEFCRCELKLQKWYGDLRGKPFAIEAENSILDISGFSKQYNCAFIWQKDGVKKLNLYLIINYFKGGKLRFKKIKPEAFEANRFYTVINKKSGEIVPMEVNFNFDDPNLIILPLAFGKRQGREFIWNDLLSLETGSLKLANGRVIEKTLYNRRTRQDEPALFVALTFERREVLDSSNIKPMNLIGVDRGENIPAVIALTDPEGCPLSRFKDSLGNPTHILRIGESYKEKQRTIQAKKEVEQRRAGGYSRKYASKAKNLADDMVRNTARDLLYYAVTQDAMLIFENLSRGFGRQGKRTFMAERQYTRMEDWLTAKLAYEGLPSKTYLSKTLAQYTSKTCSNCGFTITSADYDRVLEKLKKTATGWMTTINGKELKVEGQITYYNRYKRQNVVKDLSVELDRLSEESVNNDISSWTKGRSGEALSLLKKRFSHRPVQEKFVCLNCGFETHADEQAALNIARSWLFLRSQEYKKYQTNKTTGNTDKRAFVETWQSFYRKKLKEVWKPAV

SEQ ID NO: 14267 - protein, 979 aa, synthetic construct
QEIKGRINKIRRRLVKDSNTKKAGKTGPMKTLLVRVMTPDLRERLENLRKKPENIPQPISNTSRANLNKLLTDYTEMKKAILHVYWEEFQKDPVGLMSRVAQPASKKIDQNKLKPEMDEKGNLTTAGFACSQCGQPLFVYKLEQVSEKGKAYTNYFGRCNVAEHEKLILLAQLKPEKDSDEAVTYSLGKFGQRALDFYSIHVTKESTHPVKPLAQIAGNRYASGPVGKALSDACMGTIASFLSKYQDIIIEHQKVVKGNQKRLESLRELAGKENLEYPSVTLPPQPHTKEGVDAYNEVIARVRTWVNLNLWQKLKLSRDDAKPLLRLKGFPSFPLVERQANEVDWWDMVCNVKKLINEKKEDGKVFWQNLAGYKRQEALRPYLSSEEDRKKGKKFARYQLGDLLLHLEKKHGEDWGKVYDEAWERIDKKVEGLSKHIKLEEERRSEDAQSKAALTDWLRAKASFVIEGLKEADKDEFCRCELKLQKWYGDLRGKPFAIEAENSILDISGFSKQYNCAFIWQKDGVKKLNLYLIINYFKGGKLRFKKIKPEAFEANRFYTVINKKSGEIVPMEVNFNFDDPNLIILPLAFGKRQGREFIWNDLLSLETGSLKLANGRVIEKTLYNRRTRQDEPALFVALTFERREVLDSSNIKPMNLIGVDRGENIPAVIALTDPEGCPLSRFKDSLGNPTHILRIGESYKEKQRTIQAKKEVEQRRAGGYSRKYASKAKNLADDMVRNTARDLLYYAVTQDAMLIFENLSRGFGRQGKRTFMAERQYTRMEDWLTAKLAYEGLPSKTYLSKTLAQYTSKTCSNCGFTITSADYDRVLEKLKKTATGWMTTINGKELKVEGQITYYNRYKRQNVVKDLSVELDRLSEESVNNDISSWTKGRSGEALSLLKKRFSHRPVQEKFVCLNCGFETHADEQAALNIARSWLFLRSQEYKKYQTNKTTGNTDKRAFVETWQSFYRKKLKEVWKPAV

SEQ ID NO: 14268 - protein, 979 aa, synthetic construct
QEIKGRINKIRRRLVKDSNTKKAGKTGPMKTLLVRVMTPDLRERLENLRKKPENIPQPISNTSRANLNKLLTDYTEMKKAILHVYWEEFQKDPVGLMSRVAQPASKKIDQNKLKPEMDEKGNLTTAGFACSQCGQPLFVYKLEQVSEKGKAYTNYFGRCNVAEHEKLILLAQLKPEKDSDEAVTYSLGKFGQRALDFYSIHVTKESTHPVKPLAQIAGNRYASGPVGKALSDACMGTIASFLSKYQDIIIEHQKVVKGNQKRLESLRELAGKENLEYPSVTLPPQPHTKEGVDAYNEVIARVRMWVNLNLWQKLKLSRDDAKPLLRLKGFPSFPLVERQANEVDWWDMVCNVKKLINEKKEDGKVFWQNLAGYKRQEALRPYLSSEEDRKKGKKFARTQLGDLLLHLEKKHGEDWGKVYDEAWERIDKKVEGLSKHIKLEEERRSEDAQSKAALTDWLRAKASFVIEGLKEADKDEFCRCELKLQKWYGDLRGKPFAIEAENSILDISGFSKQYNCAFIWQKDGVKKLNLYLIINYFKGGKLRFKKIKPEAFEANRFYTVINKKSGEIVPMEVNFNFDDPNLIILPLAFGKRQGREFIWNDLLSLETGSLKLANGRVIEKTLYNRRTRQDEPALFVALTFERREVLDSSNIKPMNLIGVDRGENIPAVIALTDPEGCPLSRFKDSLGNPTHILRIGESYKEKQRTIQAKKEVEQRRAGGYSRKYASKAKNLADDMVRNTARDLLYYAVTQDAMLIFENLSRGFGRQGKRTFMAERQYTRMEDWLTAKLAYEGLPSKTYLSKTLAQYTSKTCSNCGFTITSADYDRVLEKLKKTATGWMTTINGKELKVEGQITYYNRYKRQNVVKDLSVELDRLSEESVNNDISSWTKGRSGEALSLLKKRFSHRPVQEKFVCLNCGFETHADEQAALNIARSWLFLRSQEYKKYQTNKTTGNTDKRAFVETWQSFYRKKLKEVWKPAV

SEQ ID NO: 14269 - protein, 979 aa, synthetic construct
QEIKGRINKIRRRLVKDSNTKKAGKTGPMKTLLVRVMTPDLRERLENLRKKPENIPQPISNTSRANLNKLLTDYTEMKKAILHVYWEEFQKDPVGLMSRVAQPASKKIDQNKLKPEMDEKGNLTTAGFACSQCGQPLFVYKLEQVSEKGKAYTNYFGRCNVAEHEKLILLAQLKPEKDSDEAVTYSLGKFGQRALDFYSIHVTKESTHPVKPLAQIAGNRYASGPVGKALSDACMGTIASFLSKYQDIIIEHQKVVKGNQKRLESLRELAGKENLEYPSVTLPPQPHTKEGVDAYNEVIARVRMWVNLNLWQKLKLSRDDAKPLLRLKGFPSFPLVERQANEVDWWDMVCNVKKLINEKKEDGKVFWQNLAGYKRQEALRPYLSSEEDRKKGKKFARYQLGDLLLHLEKKHGEDWGKVYDEAWERIDKKVEGLSKHIKLEEERRSEDAQSKAALTDWLRAKASFVIEGLKEADKDEFCRCELKLQKWYGDLRGKPFAIEAENSILDISGFSKQYNCAFIWQKDGVKKLNLYLIINYFKGGKLRFKKIKPEAFEANRFYTVINKKSGEIVPMEVNFNFDDPNLIILPLAFGKRQGREFIWNDLLSLETGSLKLANGRVIEKTLYNRRTRQDEPALFVALTFERREVLDSSNIKPMNLIGVDRGENIPAVIALTDPEGCPLSRFKDSLGNPTHILRIGESYKEKQRTIQAKKEVEQRRAGGYSRKYASKAKNLADDMVRNTARDLLYYAVTQDAMLIFENLSRGFGRQGKRTFMAERQYTRMEDWLTAKLAYEGLPSKTYLSKTLAQYTSKTCSNCGFTITSADYDRVLEKLKKTATGWMTTINGKELKVEGQITYYNRYKRQNVVKDLSVELDRLSEESVNNDISSWTKGRQGEALSLLKKRFSHRPVQEKFVCLNCGFETHADEQAALNIARSWLFLRSQEYKKYQTNKTTGNTDKRAFVETWQSFYRKKLKEVWKPAV

SEQ ID NO: 14270 - protein, 979 aa, synthetic construct
QEIKRINKIRRRLVKDSNTKKAGKTRGPMKTLLVRVMTPDLRERLENLRKKPENIPQPISNTSRANLNKLLTDYTEMKKAILHVYWEEFQKDPVGLMSRVAQPASKKIDQNKLKPEMDEKGNLTTAGFACSQCGQPLFVYKLEQVSEKGKAYTNYFGRCNVAEHEKLILLAQLKPEKDSDEAVTYSLGKFGQRALDFYSIHVTKESTHPVKPLAQIAGNRYASGPVGKALSDACMGTIASFLSKYQDIIIEHQKVVKGNQKRLESLRELAGKENLEYPSVTLPPQPHTKEGVDAYNEVIARVRWWVNLNLWQKLKLSRDDAKPLLRLKGFPSFPLVERQANEVDWWDMVCNVKKLINEKKEDGKVFWQNLAGYKRQEALRPYLSSEEDRKKGKKFARYQLGDLLLHLEKKHGEDWGKVYDEAWERIDKKVEGLSKHIKLEEERRSEDAQSKAALTDWLRAKASFVIEGLKEADKDEFCRCELKLQKWYGDLRGKPFAIEAENSILDISGFSKQYNCAFIWQKDGVKKLNLYLIINYFKGGKLRFKKIKPEAFEANRFYTVINKKSGEIVPMEVNFNFDDPNLIILPLAFGKRQGREFIWNDLLSLETGSLKLANGRVIEKTLYNRRTRQDEPALFVALTFERREVLDSSNIKPMNLIGVDRGENIPAVIALTDPEGCPLSRFKDSLGNPTHILRIGESYKEKQRTIQAKKEVEQRRAGGYSRKYASKAKNLADDMVRNTARDLLYYAVTQDAMLIFENLSRGFGRQGKRTFMAERQYTRMEDWLTAKLAYEGLPSKTYLSKTLAQYTSKTCSNCGFTITSADYDRVLEKLKKTATGWMTTINGKELKVEGQITYYNRYKRQNVVKDLSVELDRLSEESVNNDISSWTKGRSGEALSLLKKRFSHRPVQEKFVCLNCGFETHADEQAALNIARSWLFLRSQEYKKYQTNKTTGNTDKRAFVETWQSFYRKKLKEVWKPAV

SEQ ID NO: 14271 - protein, 978 aa, synthetic construct
QEIKRINKIRRRLVKDSNTKKAGKTGPMKTLLVRVMTPDLRERLENLRKKPENIPQPISNTSRANLNKLLTDYTEMKKAILHVYWEEFQKDPVGLMSRVAQPASKKIDQNKLKPEMDEKGNLTTAGFACSQCGQPLFVYKLEQVSEKGKAYTNYFGRCNVAEHEKLIKLAQLKPEKDSDEAVTYSLGKFGQRALDFYSIHVTKESTHPVKPLAQIAGNRYASGPVGKALSDACMGTIASFLSKYQDIIIEHQKVVKGNQKRLESLRELAGKENLEYPSVTLPPQPHTKEGVDAYNEVIARVRWWVNLNLWQKLKLSRDDAKPLLRLKGFPSFPLVERQANEVDWWDMVCNVKKLINEKKEDGKVFWQNLAGYKRQEALRPYLSSEEDRKKGKKFARYQLGDLLLHLEKKHGEDWGKVYDEAWERIDKKVEGLSKHIKLEEERRSEDAQSKAALTDWLRAKASFVIEGLKEADKDEFCRCELKLQKWYGDLRGKPFAIEAENSILDISGFSKQYNCAFIWQKDGVKKLNLYLIINYFKGGKLRFKKIKPEAFEANRFYTVINKKSGEIVPMEVNFNFDDPNLIILPLAFGKRQGREFIWNDLLSLETGSLKLANGRVIEKTLYNRRTRQDEPALFVALTFERREVLDSSNIKPMNLIGVDRGENIPAVIALTDPEGCPLSRFKDSLGNPTHILRIGESYKEKQRTIQAKKEVEQRRAGGYSRKYASKAKNLADDMVRNTARDLLYYAVTQDAMLIFENLSRGFGRQGKRTFMAERQYTRMEDWLTAKLAYEGLPSKTYLSKTLAQYTSKTCSNCGFTITSADYDRVLEKLKKTATGWMTTINGKELKVEGQITYYNRYKRQNVVKDLSVELDRLSEESVNNDISSWTKGRSGEALSLLKKRFSHRPVQEKFVCLNCGFETHADEQAALNIARSWLFLRSQEYKKYQTNKTTGNTDKRAFVETWQSFYRKKLKEVWKPAV

SEQ ID NO: 14272 - protein, 978 aa, synthetic construct
QEIKRINKIRRRLVKDSNTKKAGKTGPMKTLLVRVMTPDLRERLENLRKKPENIPQPISNTSRANLNKLLTDYTEMKKAILHVYWEEFQKDPVGLMSRVAQPASKKIDQNKLKPEMDEKGNLTTAGFACSQCGQPLFVYKLEQVSEKGKAYTNYFGRCNVAEHEKLILLDQLKPEKDSDEAVTYSLGKFGQRALDFYSIHVTKESTHPVKPLAQIAGNRYASGPVGKALSDACMGTIASFLSKYQDIIIEHQKVVKGNQKRLESLRELAGKENLEYPSVTLPPQPHTKEGVDAYNEVIARVRWWVNLNLWQKLKLSRDDAKPLLRLKGFPSFPLVERQANEVDWWDMVCNVKKLINEKKEDGKVFWQNLAGYKRQEALRPYLSSEEDRKKGKKFARYQLGDLLLHLEKKHGEDWGKVYDEAWERIDKKVEGLSKHIKLEEERRSEDAQSKAALTDWLRAKASFVIEGLKEADKDEFCRCELKLQKWYGDLRGKPFAIEAENSILDISGFSKQYNCAFIWQKDGVKKLNLYLIINYFKGGKLRFKKIKPEAFEANRFYTVINKKSGEIVPMEVNFNFDDPNLIILPLAFGKRQGREFIWNDLLSLETGSLKLANGRVIEKTLYNRRTRQDEPALFVALTFERREVLDSSNIKPMNLIGVDRGENIPAVIALTDPEGCPLSRFKDSLGNPTHILRIGESYKEKQRTIQAKKEVEQRRAGGYSRKYASKAKNLADDMVRNTARDLLYYAVTQDAMLIFENLSRGFGRQGKRTFMAERQYTRMEDWLTAKLAYEGLPSKTYLSKTLAQYTSKTCSNCGFTITSADYDRVLEKLKKTATGWMTTINGKELKVEGQITYYNRYKRQNVVKDLSVELDRLSEESVNNDISSWTKGRSGEALSLLKKRFSHRPVQEKFVCLNCGFETHADEQAALNIARSWLFLRSQEYKKYQTNKTTGNTDKRAFVETWQSFYRKKLKEVWKPAV

SEQ ID NO: 14273 - protein, 978 aa, synthetic construct
QEIKRINKIRRRLVKDSNTKKAGKTGPMKTLLVRVMTPDLRERLENLRKKPENIPQPISNTSRANLNKLLTDYTEMKKAILHVYWEEFQKDPVGLMSRVAQPASKKIDQNKLKPEMDEKGNLTTAGFACSQCGQPLFVYKLEQVSEKGKAYTNYFGRCNVAEHEKLILLAQLKPEKDSDEAVTYSLGKFGQRALDFYSIHVTKESTHPVKPLAQIAGNRYASGPVGKALSDACMGTIASFLSKYQDIIIEHQKVVKGNQKRLESLRELAGKENLEYPSVTLPPQPHTKEGVDAYNEVIARVRWWVNLNLWQKLKLSRDDAKPLLRLKGFPSFPLVERQANEVDWWDMVCNVKKLINEKKEDGKVFWQNLAGYKRQEALRPYLSSEEDRKKGKKFARTQLGDLLLHLEKKHGEDWGKVYDEAWERIDKKVEGLSKHIKLEEERRSEDAQSKAALTDWLRAKASFVIEGLKEADKDEFCRCELKLQKWYGDLRGKPFAIEAENSILDISGFSKQYNCAFIWQKDGVKKLNLYLIINYFKGGKLRFKKIKPEAFEANRFYTVINKKSGEIVPMEVNFNFDDPNLIILPLAFGKRQGREFIWNDLLSLETGSLKLANGRVIEKTLYNRRTRQDEPALFVALTFERREVLDSSNIKPMNLIGVDRGENIPAVIALTDPEGCPLSRFKDSLGNPTHILRIGESYKEKQRTIQAKKEVEQRRAGGYSRKYASKAKNLADDMVRNTARDLLYYAVTQDAMLIFENLSRGFGRQGKRTFMAERQYTRMEDWLTAKLAYEGLPSKTYLSKTLAQYTSKTCSNCGFTITSADYDRVLEKLKKTATGWMTTINGKELKVEGQITYYNRYKRQNVVKDLSVELDRLSEESVNNDISSWTKGRSGEALSLLKKRFSHRPVQEKFVCLNCGFETHADEQAALNIARSWLFLRSQEYKKYQTNKTTGNTDKRAFVETWQSFYRKKLKEVWKPAV

SEQ ID NO: 14274 - protein, 978 aa, synthetic construct
QEIKRINKIRRRLVKDSNTKKAGKTGPMKTLLVRVMTPDLRERLENLRKKPENIPQPISNTSRANLNKLLTDYTEMKKAILHVYWEEFQKDPVGLMSRVAQPASKKIDQNKLKPEMDEKGNLTTAGFACSQCGQPLFVYKLEQVSEKGKAYTNYFGRCNVAEHEKLILLAQLKPEKDSDEAVTYSLGKFGQRALDFYSIHVTKESTHPVKPLAQIAGNRYASGPVGKALSDACMGTIASFLSKYQDIIIEHQKVVKGNQKRLESLRELAGKENLEYPSVTLPPQPHTKEGVDAYNEVIARVRWWVNLNLWQKLKLSRDDAKPLLRLKGFPSFPLVERQANEVDWWDMVCNVKKLINEKKEDGKVFWQNLAGYKRQEALRPYLSSEEDRKKGKKFARYQLGDLLLHLEKKHGEDWGKVYDEAWERIDKKVEGLSKHIKLEEERRSEDAQSKAALTDWLRAKASFVIEGLKEADKDEFCRCELKLQKWYGDLRGKPFAIEAENSILDISGFSKQYNCAFIWQKDGVKKLNLYLIINYFKGGKLRFKKIKPEAFEANRFYTVINKKSGEIVPMEVNFNFDDPNLIILPLAFGKRQGREFIWNDLLSLETGSLKLANGRVIEKTLYNRRTRQDEPALFVALTFERREVLDSSNIKPMNLIGVDRGENIPAVIALTDPEGCPLSRFKDSLGNPTHILRIGESYKEKQRTIQAKKEVEQRRAGGYSRKYASKAKNLADDMVRNTARDLLYYAVTQDAMLIFENLSRGFGRQGKRTFMAERQYTRMEDWLTAKLAYEGLPSKTYLSKTLAQYTSKTCSNCGFTITSADYDRVLEKLKKTATGWMTTINGKELKVEGQITYYNRYKRQNVVKDLSVELDRLSEESVNNDISSWTKGRQGEALSLLKKRFSHRPVQEKFVCLNCGFETHADEQAALNIARSWLFLRSQEYKKYQTNKTTGNTDKRAFVETWQSFYRKKLKEVWKPAV

SEQ ID NO: 14275 - protein, 979 aa, synthetic construct
QEIKRINKIRRRLVKDSNTKKAGKTRGPMKTLLVRVMTPDLRERLENLRKKPENIPQPISNTSRANLNKLLTDYTEMKKAILHVYWEEFQKDPVGLMSRVAQPASKKIDQNKLKPEMDEKGNLTTAGFACSQCGQPLFVYKLEQVSEKGKAYTNYFGRCNVAEHEKLILLAQLKPEKDSDEAVTYSLGKFGQRALDFYSIHVTKESTHPVKPLAQIAGNRYASGPVGKALSDACMGTIASFLSKYQDIIIEHQKVVKGNQKRLESLRELAGKENLEYPSVTLPPQPHTKEGVDAYNEVIARVRMWVNLNLWQKLKLSRDDAKPLLRLKGFPSFPLVERQANEVDWWDMVCNVKKLINEKKEDGKVFWQNLAGYKRQEALRPYLSSEEDRKKGKKFARYQLGDLLLHLEKKHGEDWGKVYDEAWERIDKKVEGLSKHIKLEEERRSEDAQSKAALTDWLRAKASFVIEGLKEADKDEFCRCDLKLQKWYGDLRGKPFAIEAENSILDISGFSKQYNCAFIWQKDGVKKLNLYLIINYFKGGKLRFKKIKPEAFEANRFYTVINKKSGEIVPMEVNFNFDDPNLIILPLAFGKRQGREFIWNDLLSLETGSLKLANGRVIEKTLYNRRTRQDEPALFVALTFERREVLDSSNIKPMNLIGVDRGENIPAVIALTDPEGCPLSRFKDSLGNPTHILRIGESYKEKQRTIQAKKEVEQRRAGGYSRKYASKAKNLADDMVRNTARDLLYYAVTQDAMLIFENLSRGFGRQGKRTFMAERQYTRMEDWLTAKLAYEGLPSKTYLSKTLAQYTSKTCSNCGFTITSADYDRVLEKLKKTATGWMTTINGKELKVEGQITYYNRYKRQNVVKDLSVELDRLSEESVNNDISSWTKGRSGEALSLLKKRFSHRPVQEKFVCLNCGFETHADEQAALNIARSWLFLRSQEYKKYQTNKTTGNTDKRAFVETWQSFYRKKLKEVWKPAV

SEQ ID NO: 14276 - protein, 978 aa, synthetic construct
QEIKRINKIRRRLVKDSNTKKAGKTGPMKTLLVRVMTPDLRERLENLRKKPENIPQPISNTSRANLNKLLTDYTEMKKAILHVYWEEFQKDPVGLMSRVAQPASKKIDQNKLKPEMDEKGNLTTAGFACSQCGQPLFVYKLEQVSEKGKAYTNYFGRCNVAEHEKLIKLAQLKPEKDSDEAVTYSLGKFGQRALDFYSIHVTKESTHPVKPLAQIAGNRYASGPVGKALSDACMGTIASFLSKYQDIIIEHQKVVKGNQKRLESLRELAGKENLEYPSVTLPPQPHTKEGVDAYNEVIARVRMWVNLNLWQKLKLSRDDAKPLLRLKGFPSFPLVERQANEVDWWDMVCNVKKLINEKKEDGKVFWQNLAGYKRQEALRPYLSSEEDRKKGKKFARYQLGDLLLHLEKKHGEDWGKVYDEAWERIDKKVEGLSKHIKLEEERRSEDAQSKAALTDWLRAKASFVIEGLKEADKDEFCRCDLKLQKWYGDLRGKPFAIEAENSILDISGFSKQYNCAFIWQKDGVKKLNLYLIINYFKGGKLRFKKIKPEAFEANRFYTVINKKSGEIVPMEVNFNFDDPNLIILPLAFGKRQGREFIWNDLLSLETGSLKLANGRVIEKTLYNRRTRQDEPALFVALTFERREVLDSSNIKPMNLIGVDRGENIPAVIALTDPEGCPLSRFKDSLGNPTHILRIGESYKEKQRTIQAKKEVEQRRAGGYSRKYASKAKNLADDMVRNTARDLLYYAVTQDAMLIFENLSRGFGRQGKRTFMAERQYTRMEDWLTAKLAYEGLPSKTYLSKTLAQYTSKTCSNCGFTITSADYDRVLEKLKKTATGWMTTINGKELKVEGQITYYNRYKRQNVVKDLSVELDRLSEESVNNDISSWTKGRSGEALSLLKKRFSHRPVQEKFVCLNCGFETHADEQAALNIARSWLFLRSQEYKKYQTNKTTGNTDKRAFVETWQSFYRKKLKEVWKPAV

SEQ ID NO: 14277 - protein, 978 aa, synthetic construct
QEIKRINKIRRRLVKDSNTKKAGKTGPMKTLLVRVMTPDLRERLENLRKKPENIPQPISNTSRANLNKLLTDYTEMKKAILHVYWEEFQKDPVGLMSRVAQPASKKIDQNKLKPEMDEKGNLTTAGFACSQCGQPLFVYKLEQVSEKGKAYTNYFGRCNVAEHEKLILLDQLKPEKDSDEAVTYSLGKFGQRALDFYSIHVTKESTHPVKPLAQIAGNRYASGPVGKALSDACMGTIASFLSKYQDIIIEHQKVVKGNQKRLESLRELAGKENLEYPSVTLPPQPHTKEGVDAYNEVIARVRMWVNLNLWQKLKLSRDDAKPLLRLKGFPSFPLVERQANEVDWWDMVCNVKKLINEKKEDGKVFWQNLAGYKRQEALRPYLSSEEDRKKGKKFARYQLGDLLLHLEKKHGEDWGKVYDEAWERIDKKVEGLSKHIKLEEERRSEDAQSKAALTDWLRAKASFVIEGLKEADKDEFCRCDLKLQKWYGDLRGKPFAIEAENSILDISGFSKQYNCAFIWQKDGVKKLNLYLIINYFKGGKLRFKKIKPEAFEANRFYTVINKKSGEIVPMEVNFNFDDPNLIILPLAFGKRQGREFIWNDLLSLETGSLKLANGRVIEKTLYNRRTRQDEPALFVALTFERREVLDSSNIKPMNLIGVDRGENIPAVIALTDPEGCPLSRFKDSLGNPTHILRIGESYKEKQRTIQAKKEVEQRRAGGYSRKYASKAKNLADDMVRNTARDLLYYAVTQDAMLIFENLSRGFGRQGKRTFMAERQYTRMEDWLTAKLAYEGLPSKTYLSKTLAQYTSKTCSNCGFTITSADYDRVLEKLKKTATGWMTTINGKELKVEGQITYYNRYKRQNVVKDLSVELDRLSEESVNNDISSWTKGRSGEALSLLKKRFSHRPVQEKFVCLNCGFETHADEQAALNIARSWLFLRSQEYKKYQTNKTTGNTDKRAFVETWQSFYRKKLKEVWKPAV

SEQ ID NO: 14278 - protein, 978 aa, synthetic construct
QEIKRINKIRRRLVKDSNTKKAGKTGPMKTLLVRVMTPDLRERLENLRKKPENIPQPISNTSRANLNKLLTDYTEMKKAILHVYWEEFQKDPVGLMSRVAQPASKKIDQNKLKPEMDEKGNLTTAGFACSQCGQPLFVYKLEQVSEKGKAYTNYFGRCNVAEHEKLILLAQLKPEKDSDEAVTYSLGKFGQRALDFYSIHVTKESTHPVKPLAQIAGNRYASGPVGKALSDACMGTIASFLSKYQDIIIEHQKVVKGNQKRLESLRELAGKENLEYPSVTLPPQPHTKEGVDAYNEVIARVRTWVNLNLWQKLKLSRDDAKPLLRLKGFPSFPLVERQANEVDWWDMVCNVKKLINEKKEDGKVFWQNLAGYKRQEALRPYLSSEEDRKKGKKFARYQLGDLLLHLEKKHGEDWGKVYDEAWERIDKKVEGLSKHIKLEEERRSEDAQSKAALTDWLRAKASFVIEGLKEADKDEFCRCDLKLQKWYGDLRGKPFAIEAENSILDISGFSKQYNCAFIWQKDGVKKLNLYLIINYFKGGKLRFKKIKPEAFEANRFYTVINKKSGEIVPMEVNFNFDDPNLIILPLAFGKRQGREFIWNDLLSLETGSLKLANGRVIEKTLYNRRTRQDEPALFVALTFERREVLDSSNIKPMNLIGVDRGENIPAVIALTDPEGCPLSRFKDSLGNPTHILRIGESYKEKQRTIQAKKEVEQRRAGGYSRKYASKAKNLADDMVRNTARDLLYYAVTQDAMLIFENLSRGFGRQGKRTFMAERQYTRMEDWLTAKLAYEGLPSKTYLSKTLAQYTSKTCSNCGFTITSADYDRVLEKLKKTATGWMTTINGKELKVEGQITYYNRYKRQNVVKDLSVELDRLSEESVNNDISSWTKGRSGEALSLLKKRFSHRPVQEKFVCLNCGFETHADEQAALNIARSWLFLRSQEYKKYQTNKTTGNTDKRAFVETWQSFYRKKLKEVWKPAV

SEQ ID NO: 14279 - protein, 978 aa, synthetic construct
QEIKRINKIRRRLVKDSNTKKAGKTGPMKTLLVRVMTPDLRERLENLRKKPENIPQPISNTSRANLNKLLTDYTEMKKAILHVYWEEFQKDPVGLMSRVAQPASKKIDQNKLKPEMDEKGNLTTAGFACSQCGQPLFVYKLEQVSEKGKAYTNYFGRCNVAEHEKLILLAQLKPEKDSDEAVTYSLGKFGQRALDFYSIHVTKESTHPVKPLAQIAGNRYASGPVGKALSDACMGTIASFLSKYQDIIIEHQKVVKGNQKRLESLRELAGKENLEYPSVTLPPQPHTKEGVDAYNEVIARVRMWVNLNLWQKLKLSRDDAKPLLRLKGFPSFPLVERQANEVDWWDMVCNVKKLINEKKEDGKVFWQNLAGYKRQEALRPYLSSEEDRKKGKKFARTQLGDLLLHLEKKHGEDWGKVYDEAWERIDKKVEGLSKHIKLEEERRSEDAQSKAALTDWLRAKASFVIEGLKEADKDEFCRCDLKLQKWYGDLRGKPFAIEAENSILDISGFSKQYNCAFIWQKDGVKKLNLYLIINYFKGGKLRFKKIKPEAFEANRFYTVINKKSGEIVPMEVNFNFDDPNLIILPLAFGKRQGREFIWNDLLSLETGSLKLANGRVIEKTLYNRRTRQDEPALFVALTFERREVLDSSNIKPMNLIGVDRGENIPAVIALTDPEGCPLSRFKDSLGNPTHILRIGESYKEKQRTIQAKKEVEQRRAGGYSRKYASKAKNLADDMVRNTARDLLYYAVTQDAMLIFENLSRGFGRQGKRTFMAERQYTRMEDWLTAKLAYEGLPSKTYLSKTLAQYTSKTCSNCGFTITSADYDRVLEKLKKTATGWMTTINGKELKVEGQITYYNRYKRQNVVKDLSVELDRLSEESVNNDISSWTKGRSGEALSLLKKRFSHRPVQEKFVCLNCGFETHADEQAALNIARSWLFLRSQEYKKYQTNKTTGNTDKRAFVETWQSFYRKKLKEVWKPAV

SEQ ID NO: 14280 - protein, 978 aa, synthetic construct
QEIKRINKIRRRLVKDSNTKKAGKTGPMKTLLVRVMTPDLRERLENLRKKPENIPQPISNTSRANLNKLLTDYTEMKKAILHVYWEEFQKDPVGLMSRVAQPASKKIDQNKLKPEMDEKGNLTTAGFACSQCGQPLFVYKLEQVSEKGKAYTNYFGRCNVAEHEKLILLAQLKPEKDSDEAVTYSLGKFGQRALDFYSIHVTKESTHPVKPLAQIAGNRYASGPVGKALSDACMGTIASFLSKYQDIIIEHQKVVKGNQKRLESLRELAGKENLEYPSVTLPPQPHTKEGVDAYNEVIARVRMWVNLNLWQKLKLSRDDAKPLLRLKGFPSFPLVERQANEVDWWDMVCNVKKLINEKKEDGKVFWQNLAGYKRQEALRPYLSSEEDRKKGKKFARYQLGDLLLHLEKKHGEDWGKVYDEAWERIDKKVEGLSKHIKLEEERRSEDAQSKAALTDWLRAKASFVIEGLKEADKDEFCRCDLKLQKWYGDLRGKPFAIEAENSILDISGFSKQYNCAFIWQKDGVKKLNLYLIINYFKGGKLRFKKIKPEAFEANRFYTVINKKSGEIVPMEVNFNFDDPNLIILPLAFGKRQGREFIWNDLLSLETGSLKLANGRVIEKTLYNRRTRQDEPALFVALTFERREVLDSSNIKPMNLIGVDRGENIPAVIALTDPEGCPLSRFKDSLGNPTHILRIGESYKEKQRTIQAKKEVEQRRAGGYSRKYASKAKNLADDMVRNTARDLLYYAVTQDAMLIFENLSRGFGRQGKRTFMAERQYTRMEDWLTAKLAYEGLPSKTYLSKTLAQYTSKTCSNCGFTITSADYDRVLEKLKKTATGWMTTINGKELKVEGQITYYNRYKRQNVVKDLSVELDRLSEESVNNDISSWTKGRQGEALSLLKKRFSHRPVQEKFVCLNCGFETHADEQAALNIARSWLFLRSQEYKKYQTNKTTGNTDKRAFVETWQSFYRKKLKEVWKPAV

SEQ ID NO: 14281 - protein, 979 aa, synthetic construct
QEIKRINKIRRRLVKDSNTKKAGKTRGPMKTLLVRVMTPDLRERLENLRKKPENIPQPISNTSRANLNKLLTDYTEMKKAILHVYWEEFQKDPVGLMSRVAQPASKKIDQNKLKPEMDEKGNLTTAGFACSQCGQPLFVYKLEQVSEKGKAYTNYFGRCNVAEHEKLILLAQLKPEKDSDEAVTYSLGKFGQRALDFYSIHVTKESTHPVKPLAQIAGNRYASGPVGKALSDACMGTIASFLSKYQDIIIEHQKVVKGNQKRLESLRELAGKENLEYPSVTLPPQPHTKEGVDAYNEVIARVRMWVNLNLWQKLKLSRDDAKPLLRLKGFPSFPLVERQANEVDWWDMVCNVKKLINEKKEDGKVFWQNLAGYKRQEALRPYLSSEEDRKKGKKFARYQLGDLLLHLEKKHGEDWGKVYDEAWERIDKKVEGLSKHIKLEEERRSEDAQSKAALTDWLRAKASFVIEGLKEADKDEFCRCELKLQKWYGDLRGKPFAIEAENSILDISGFSKQYNCAFIWQKDGVKKLNLYLIINYFKGGKLRFKKIKPEAFEANRFYTVINKKSGEIVPMEVNFNFDDPNLIILPLAFGKRQGREFIWNDLLSLETGSLKLANGRVIEKTLYNRRTRQDEPALFVALTFERREVLDSSNIKPMNLIGVDRGENIPAVIALTDPEGCPLSRFKDSLGNPTHILRIGERYKEKQRTIQAKKEVEQRRAGGYSRKYASKAKNLADDMVRNTARDLLYYAVTQDAMLIFENLSRGFGRQGKRTFMAERQYTRMEDWLTAKLAYEGLPSKTYLSKTLAQYTSKTCSNCGFTITSADYDRVLEKLKKTATGWMTTINGKELKVEGQITYYNRYKRQNVVKDLSVELDRLSEESVNNDISSWTKGRSGEALSLLKKRFSHRPVQEKFVCLNCGFETHADEQAALNIARSWLFLRSQEYKKYQTNKTTGNTDKRAFVETWQSFYRKKLKEVWKPAV

SEQ ID NO: 14282 - protein, 978 aa, synthetic construct
QEIKRINKIRRRLVKDSNTKKAGKTGPMKTLLVRVMTPDLRERLENLRKKPENIPQPISNTSRANLNKLLTDYTEMKKAILHVYWEEFQKDPVGLMSRVAQPASKKIDQNKLKPEMDEKGNLTTAGFACSQCGQPLFVYKLEQVSEKGKAYTNYFGRCNVAEHEKLIKLAQLKPEKDSDEAVTYSLGKFGQRALDFYSIHVTKESTHPVKPLAQIAGNRYASGPVGKALSDACMGTIASFLSKYQDIIIEHQKVVKGNQKRLESLRELAGKENLEYPSVTLPPQPHTKEGVDAYNEVIARVRMWVNLNLWQKLKLSRDDAKPLLRLKGFPSFPLVERQANEVDWWDMVCNVKKLINEKKEDGKVFWQNLAGYKRQEALRPYLSSEEDRKKGKKFARYQLGDLLLHLEKKHGEDWGKVYDEAWERIDKKVEGLSKHIKLEEERRSEDAQSKAALTDWLRAKASFVIEGLKEADKDEFCRCELKLQKWYGDLRGKPFAIEAENSILDISGFSKQYNCAFIWQKDGVKKLNLYLIINYFKGGKLRFKKIKPEAFEANRFYTVINKKSGEIVPMEVNFNFDDPNLIILPLAFGKRQGREFIWNDLLSLETGSLKLANGRVIEKTLYNRRTRQDEPALFVALTFERREVLDSSNIKPMNLIGVDRGENIPAVIALTDPEGCPLSRFKDSLGNPTHILRIGERYKEKQRTIQAKKEVEQRRAGGYSRKYASKAKNLADDMVRNTARDLLYYAVTQDAMLIFENLSRGFGRQGKRTFMAERQYTRMEDWLTAKLAYEGLPSKTYLSKTLAQYTSKTCSNCGFTITSADYDRVLEKLKKTATGWMTTINGKELKVEGQITYYNRYKRQNVVKDLSVELDRLSEESVNNDISSWTKGRSGEALSLLKKRFSHRPVQEKFVCLNCGFETHADEQAALNIARSWLFLRSQEYKKYQTNKTTGNTDKRAFVETWQSFYRKKLKEVWKPAV

SEQ ID NO: 14283 - protein, 978 aa, synthetic construct
QEIKRINKIRRRLVKDSNTKKAGKTGPMKTLLVRVMTPDLRERLENLRKKPENIPQPISNTSRANLNKLLTDYTEMKKAILHVYWEEFQKDPVGLMSRVAQPASKKIDQNKLKPEMDEKGNLTTAGFACSQCGQPLFVYKLEQVSEKGKAYTNYFGRCNVAEHEKLILLDQLKPEKDSDEAVTYSLGKFGQRALDFYSIHVTKESTHPVKPLAQIAGNRYASGPVGKALSDACMGTIASFLSKYQDIIIEHQKVVKGNQKRLESLRELAGKENLEYPSVTLPPQPHTKEGVDAYNEVIARVRMWVNLNLWQKLKLSRDDAKPLLRLKGFPSFPLVERQANEVDWWDMVCNVKKLINEKKEDGKVFWQNLAGYKRQEALRPYLSSEEDRKKGKKFARYQLGDLLLHLEKKHGEDWGKVYDEAWERIDKKVEGLSKHIKLEEERRSEDAQSKAALTDWLRAKASFVIEGLKEADKDEFCRCELKLQKWYGDLRGKPFAIEAENSILDISGFSKQYNCAFIWQKDGVKKLNLYLIINYFKGGKLRFKKIKPEAFEANRFYTVINKKSGEIVPMEVNFNFDDPNLIILPLAFGKRQGREFIWNDLLSLETGSLKLANGRVIEKTLYNRRTRQDEPALFVALTFERREVLDSSNIKPMNLIGVDRGENIPAVIALTDPEGCPLSRFKDSLGNPTHILRIGERYKEKQRTIQAKKEVEQRRAGGYSRKYASKAKNLADDMVRNTARDLLYYAVTQDAMLIFENLSRGFGRQGKRTFMAERQYTRMEDWLTAKLAYEGLPSKTYLSKTLAQYTSKTCSNCGFTITSADYDRVLEKLKKTATGWMTTINGKELKVEGQITYYNRYKRQNVVKDLSVELDRLSEESVNNDISSWTKGRSGEALSLLKKRFSHRPVQEKFVCLNCGFETHADEQAALNIARSWLFLRSQEYKKYQTNKTTGNTDKRAFVETWQSFYRKKLKEVWKPAV

SEQ ID NO: 14284 - protein, 978 aa, synthetic construct
QEIKRINKIRRRLVKDSNTKKAGKTGPMKTLLVRVMTPDLRERLENLRKKPENIPQPISNTSRANLNKLLTDYTEMKKAILHVYWEEFQKDPVGLMSRVAQPASKKIDQNKLKPEMDEKGNLTTAGFACSQCGQPLFVYKLEQVSEKGKAYTNYFGRCNVAEHEKLILLAQLKPEKDSDEAVTYSLGKFGQRALDFYSIHVTKESTHPVKPLAQIAGNRYASGPVGKALSDACMGTIASFLSKYQDIIIEHQKVVKGNQKRLESLRELAGKENLEYPSVTLPPQPHTKEGVDAYNEVIARVRTWVNLNLWQKLKLSRDDAKPLLRLKGFPSFPLVERQANEVDWWDMVCNVKKLINEKKEDGKVFWQNLAGYKRQEALRPYLSSEEDRKKGKKFARYQLGDLLLHLEKKHGEDWGKVYDEAWERIDKKVEGLSKHIKLEEERRSEDAQSKAALTDWLRAKASFVIEGLKEADKDEFCRCELKLQKWYGDLRGKPFAIEAENSILDISGFSKQYNCAFIWQKDGVKKLNLYLIINYFKGGKLRFKKIKPEAFEANRFYTVINKKSGEIVPMEVNFNFDDPNLIILPLAFGKRQGREFIWNDLLSLETGSLKLANGRVIEKTLYNRRTRQDEPALFVALTFERREVLDSSNIKPMNLIGVDRGENIPAVIALTDPEGCPLSRFKDSLGNPTHILRIGERYKEKQRTIQAKKEVEQRRAGGYSRKYASKAKNLADDMVRNTARDLLYYAVTQDAMLIFENLSRGFGRQGKRTFMAERQYTRMEDWLTAKLAYEGLPSKTYLSKTLAQYTSKTCSNCGFTITSADYDRVLEKLKKTATGWMTTINGKELKVEGQITYYNRYKRQNVVKDLSVELDRLSEESVNNDISSWTKGRSGEALSLLKKRFSHRPVQEKFVCLNCGFETHADEQAALNIARSWLFLRSQEYKKYQTNKTTGNTDKRAFVETWQSFYRKKLKEVWKPAV

SEQ ID NO: 14285 - protein, 978 aa, synthetic construct
QEIKRINKIRRRLVKDSNTKKAGKTGPMKTLLVRVMTPDLRERLENLRKKPENIPQPISNTSRANLNKLLTDYTEMKKAILHVYWEEFQKDPVGLMSRVAQPASKKIDQNKLKPEMDEKGNLTTAGFACSQCGQPLFVYKLEQVSEKGKAYTNYFGRCNVAEHEKLILLAQLKPEKDSDEAVTYSLGKFGQRALDFYSIHVTKESTHPVKPLAQIAGNRYASGPVGKALSDACMGTIASFLSKYQDIIIEHQKVVKGNQKRLESLRELAGKENLEYPSVTLPPQPHTKEGVDAYNEVIARVRMWVNLNLWQKLKLSRDDAKPLLRLKGFPSFPLVERQANEVDWWDMVCNVKKLINEKKEDGKVFWQNLAGYKRQEALRPYLSSEEDRKKGKKFARTQLGDLLLHLEKKHGEDWGKVYDEAWERIDKKVEGLSKHIKLEEERRSEDAQSKAALTDWLRAKASFVIEGLKEADKDEFCRCELKLQKWYGDLRGKPFAIEAENSILDISGFSKQYNCAFIWQKDGVKKLNLYLIINYFKGGKLRFKKIKPEAFEANRFYTVINKKSGEIVPMEVNFNFDDPNLIILPLAFGKRQGREFIWNDLLSLETGSLKLANGRVIEKTLYNRRTRQDEPALFVALTFERREVLDSSNIKPMNLIGVDRGENIPAVIALTDPEGCPLSRFKDSLGNPTHILRIGERYKEKQRTIQAKKEVEQRRAGGYSRKYASKAKNLADDMVRNTARDLLYYAVTQDAMLIFENLSRGFGRQGKRTFMAERQYTRMEDWLTAKLAYEGLPSKTYLSKTLAQYTSKTCSNCGFTITSADYDRVLEKLKKTATGWMTTINGKELKVEGQITYYNRYKRQNVVKDLSVELDRLSEESVNNDISSWTKGRSGEALSLLKKRFSHRPVQEKFVCLNCGFETHADEQAALNIARSWLFLRSQEYKKYQTNKTTGNTDKRAFVETWQSFYRKKLKEVWKPAV

SEQ ID NO: 14286 - protein, 978 aa, synthetic construct
QEIKRINKIRRRLVKDSNTKKAGKTGPMKTLLVRVMTPDLRERLENLRKKPENIPQPISNTSRANLNKLLTDYTEMKKAILHVYWEEFQKDPVGLMSRVAQPASKKIDQNKLKPEMDEKGNLTTAGFACSQCGQPLFVYKLEQVSEKGKAYTNYFGRCNVAEHEKLILLAQLKPEKDSDEAVTYSLGKFGQRALDFYSIHVTKESTHPVKPLAQIAGNRYASGPVGKALSDACMGTIASFLSKYQDIIIEHQKVVKGNQKRLESLRELAGKENLEYPSVTLPPQPHTKEGVDAYNEVIARVRMWVNLNLWQKLKLSRDDAKPLLRLKGFPSFPLVERQANEVDWWDMVCNVKKLINEKKEDGKVFWQNLAGYKRQEALRPYLSSEEDRKKGKKFARYQLGDLLLHLEKKHGEDWGKVYDEAWERIDKKVEGLSKHIKLEEERRSEDAQSKAALTDWLRAKASFVIEGLKEADKDEFCRCELKLQKWYGDLRGKPFAIEAENSILDISGFSKQYNCAFIWQKDGVKKLNLYLIINYFKGGKLRFKKIKPEAFEANRFYTVINKKSGEIVPMEVNFNFDDPNLIILPLAFGKRQGREFIWNDLLSLETGSLKLANGRVIEKTLYNRRTRQDEPALFVALTFERREVLDSSNIKPMNLIGVDRGENIPAVIALTDPEGCPLSRFKDSLGNPTHILRIGERYKEKQRTIQAKKEVEQRRAGGYSRKYASKAKNLADDMVRNTARDLLYYAVTQDAMLIFENLSRGFGRQGKRTFMAERQYTRMEDWLTAKLAYEGLPSKTYLSKTLAQYTSKTCSNCGFTITSADYDRVLEKLKKTATGWMTTINGKELKVEGQITYYNRYKRQNVVKDLSVELDRLSEESVNNDISSWTKGRQGEALSLLKKRFSHRPVQEKFVCLNCGFETHADEQAALNIARSWLFLRSQEYKKYQTNKTTGNTDKRAFVETWQSFYRKKLKEVWKPAV

SEQ ID NO: 14287 - protein, 57 aa, synthetic construct
QEIKRINKIRRRLVKDSNTKKAGKTRGPMKTLLVRVMTPDLRERLENLRKKPENIPQ

SEQ ID NO: 14288 - protein, 141 aa, synthetic construct
RALDFYSIHVTKESTHPVKPLAQIAGNRYASTPVGKALSDACMGTIASFLSKYQDIIIEHQKVVKGNQKRLESLRELAGKENLEYPSVTLPPQPHTKEGVDAYNEVIARVRMWVNLNLWQKLKLSRDDAKPLLRLKGFPSF

SEQ ID NO: 14289 - protein, 91 aa, synthetic construct
QPASKKIDQNKLKPEMDEKGNLTTAGFACSQCGQPLFVYKLEQVSEKGKAYTNYFGRCNVAEHEKLILLDQLKPEKDSDEAVTYSLGKFGQ

SEQ ID NO: 14290 - protein, 56 aa, synthetic construct
QEGKRINKIRRRLVKDSNTKKAGKTGPMKTLLVRVMTPDLRERLENLRKKPENIPQ

SEQ ID NO: 14291 - protein, 57 aa, synthetic construct
QEIGKRINKIRRRLVKDSNTKKAGKTGPMKTLLVRVMTPDLRERLENLRKKPENIPQ

SEQ ID NO: 14292 - protein, 56 aa, synthetic construct
QEIGRINKIRRRLVKDSNTKKAGKTGPMKTLLVRVMTPDLRERLENLRKKPENIPQ

SEQ ID NO: 14293 - protein, 57 aa, synthetic construct
QEIKGRINKIRRRLVKDSNTKKAGKTGPMKTLLVRVMTPDLRERLENLRKKPENIPQ

SEQ ID NO: 14294 - protein, 56 aa, synthetic construct
QEIKRINGIRRRLVKDSNTKKAGKTGPMKTLLVRVMTPDLRERLENLRKKPENIPQ

SEQ ID NO: 14295 - protein, 56 aa, synthetic construct
QEIKRINKIRRRLVKDSNTKKAGKTGPMKTLLVPVMTPDLRERLENLRKKPENIPQ

SEQ ID NO: 14296 - protein, 44 aa, synthetic construct
PISNTSQANLNKLLTDYTEMKKAILHVYWEEFQKDPVGLMSRVA

SEQ ID NO: 14297 - protein, 91 aa, synthetic construct
QPASKKIDQNKLKPEMDEKGNLTTAGFACSQCGQPLFVYKLEQVSEKGKAYTNYFGRCNVAEHEKLIKLAQLKPEKDSDEAVTYSLGKFGQ

SEQ ID NO: 14298 - protein, 91 aa, synthetic construct
QPASKKIDQNKLKPEMDEKGNLTTAGFACSQCGQPLFVYKLEQVSEKGKAYTNYFGRCNVAEHEKLILLYQLKPEKDSDEAVTYSLGKFGQ

SEQ ID NO: 14299 - protein, 91 aa, synthetic construct
QPASKKIDQNKLKPEMDEKGNLTTAGFACSQCGQPLFVYKLEQVSEKGKAYTNYFGRCNVAEHEKLILLSQLKPEKDSDEAVTYSLGKFGQ

SEQ ID NO: 14300 - protein, 141 aa, synthetic construct
RALDFYSIHVTKESTHPVKPLAQIAGNRYASGPVGKALSDACMGTIASFLSKYQDIIIEHQKVVKGNQKRLESLRELAGKENLEYPSVTLPPQPHTKEGVDAYNEVIARVRTWVNLNLWQKLKLSRDDAKPLLRLKGFPSF

SEQ ID NO: 14301 - protein, 141 aa, synthetic construct
RALDFYSIHVTKESTHPVKPLAQIAGNRYASGPVGKALSDACMGTIASFLSKYQDIIIEHQKVVKGNQKRLESLRELAGKENLEYPSVTLPPQPHTKEGVDAYNEVIARVRWWVNLNLWQKLKLSRDDAKPLLRLKGFPSF

SEQ ID NO: 14302 - protein, 168 aa, synthetic construct
PLVERQANEVDWWDMVCNVKKLINEKKEDGKVFWQNLAGYKRQEALRPYLSSEEDRKKGKKFARTQLGDLLLHLEKKHGEDWGKVYDEAWERIDKKVEGLSKHIKLEEERRSEDAQSKAALTDWLRAKASFVIEGLKEADKDEFCRCELKLQKWYGDLRGKPFAIEAE

SEQ ID NO: 14303 - protein, 168 aa, synthetic construct
PLVERQANEVDWWDMVCNVKKLINEKKEDGKVFWQNLAGYKRQEALRPYLSSEEDRKKGKKFARYQLGDLLLHLEKKHGEDWGKVYDEAWERIDKKVEGLSKHIKLEEERRSEDAQSKAALTDWLRAKASFVIEGLKEADKDEFCRCDLKLQKWYGDLRGKPFAIEAE

SEQ ID NO: 14304 - protein, 110 aa, synthetic construct
SNCGFTITSADYDRVLEKLKKTATGWMTTINGKELKVEGQITYYNRYKRQNVVKDLSVELDRLSEESVNNDISSWDKGRSGEALSLLKKRFSHRPVQEKFVCLNCGFETH

SEQ ID NO: 14305 - protein, 91 aa, synthetic construct
QPASKKIDQNKLKPEMDEKGNLTTAGFACSQCGQPLFVYKLEQVSEKGKAYTNYFGRCNVAEHEKLIQLAQLKPEKDSDEAVTYSLGKFGQ

SEQ ID NO: 14306 - protein, 110 aa, synthetic construct
SNCGFTITSADYDRMLEKLKKTATGWMTTINGKELKVEGQITYYNRYKRQNVVKDLSVELDRLSEESVNNDISSWTKGRSGEALSLLKKRFSHRPVQEKFVCLNCGFETH

SEQ ID NO: 14307 - protein, 110 aa, synthetic construct
SNCGFTITSADYDRVLEKLKKTATGWMTTINGKELKVEGQITYYNRYKRQNVVKDLSVELDRLSEESVNNDISSWTKGRQGEALSLLKKRFSHRPVQEKFVCLNCGFETH

SEQ ID NO: 14308 - protein, 164 aa, synthetic construct
SSNIKPMNLIGVDRGENIPAVIALTDPEGCPLSRFKDSLGNPTHILRIGERYKEKQRTIQAKKEVEQRRAGGYSRKYASKAKNLADDMVRNTARDLLYYAVTQDAMLIFENLSRGFGRQGKRTFMAERQYTRMEDWLTAKLAYEGLPSKTYLSKTLAQYTSKTC

SEQ ID NO: 14309 - protein, 56 aa, synthetic construct
QEGKRINKIRRRLVKDSNTKKAGKTGPMKTLLVPVMTPDLRERLENLRKKPENIPQ

SEQ ID NO: 14310 - protein, 57 aa, synthetic construct
QEIGKRINKIRRRLVKDSNTKKAGKTGPMKTLLVPVMTPDLRERLENLRKKPENIPQ

SEQ ID NO: 14311 - protein, 57 aa, synthetic construct
QEGKRINKIRRRLVKDSNTKKAGKTRGPMKTLLVRVMTPDLRERLENLRKKPENIPQ

SEQ ID NO: 14312 - protein, 56 aa, synthetic construct
QEIKRINGIRRRLVKDSNTKKAGKTGPMKTLLVPVMTPDLRERLENLRKKPENIPQ

SEQ ID NO: 14313 - protein, 58 aa, synthetic construct
QEIGKRINKIRRRLVKDSNTKKAGKTRGPMKTLLVRVMTPDLRERLENLRKKPENIPQ

SEQ ID NO: 14314 - protein, 56 aa, synthetic construct
QEGKRINGIRRRLVKDSNTKKAGKTGPMKTLLVRVMTPDLRERLENLRKKPENIPQ

SEQ ID NO: 14315 - protein, 57 aa, synthetic construct
QEIKRINKIRRRLVKDSNTKKAGKTRGPMKTLLVPVMTPDLRERLENLRKKPENIPQ

SEQ ID NO: 14316 - protein, 57 aa, synthetic construct
QEIKRINGIRRRLVKDSNTKKAGKTRGPMKTLLVRVMTPDLRERLENLRKKPENIPQ

SEQ ID NO: 14317 - protein, 57 aa, synthetic construct
QEIGKRINGIRRRLVKDSNTKKAGKTGPMKTLLVRVMTPDLRERLENLRKKPENIPQ

SEQ ID NO: 14318 - protein, 57 aa, synthetic construct
QEGGKRINKIRRRLVKDSNTKKAGKTGPMKTLLVRVMTPDLRERLENLRKKPENIPQ

SEQ ID NO: 14319 - protein, 57 aa, synthetic construct
QEIGRINKIRRRLVKDSNTKKAGKTRGPMKTLLVRVMTPDLRERLENLRKKPENIPQ

SEQ ID NO: 14320 - protein, 58 aa, synthetic construct
QEIKGRINKIRRRLVKDSNTKKAGKTRGPMKTLLVRVMTPDLRERLENLRKKPENIPQ

SEQ ID NO: 14321 - protein, 91 aa, synthetic construct
QPASKKIDQNKLKPEMDEKGNLTTAGFACSQCGQPLFVYKLEQVSEKGKAYTNYFGRCNVAEHEKLIKLDQLKPEKDSDEAVTYSLGKFGQ

SEQ ID NO: 14322 - protein, 91 aa, synthetic construct
QPASKKIDQNKLKPEMDEKGNLTTAGFACSQCGQPLFVYKLEQVSEKGKAYTNYFGRCNVAEHEKLIKLYQLKPEKDSDEAVTYSLGKFGQ

SEQ ID NO: 14323 - protein, 91 aa, synthetic construct
QPASKKIDQNKLKPEMDEKGNLTTAGFACSQCGQPLFVYKLEQVSEKGKAYTNYFGRCNVAEHEKLIKLSQLKPEKDSDEAVTYSLGKFGQ

SEQ ID NO: 14324 - protein, 91 aa, synthetic construct
QPASKKIDQNKLKPEMDEKGNLTTAGFACSQCGQPLFVYKLEQVSEKGKAYTNYFGRCNVAEHEKLIQLDQLKPEKDSDEAVTYSLGKFGQ

SEQ ID NO: 14325 - protein, 91 aa, synthetic construct
QPASKKIDQNKLKPEMDEKGNLTTAGFACSQCGQPLFVYKLEQVSEKGKAYTNYFGRCNVAEHEKLIQLYQLKPEKDSDEAVTYSLGKFGQ

SEQ ID NO: 14326 - protein, 91 aa, synthetic construct
QPASKKIDQNKLKPEMDEKGNLTTAGFACSQCGQPLFVYKLEQVSEKGKAYTNYFGRCNVAEHEKLIQLSQLKPEKDSDEAVTYSLGKFGQ

SEQ ID NO: 14327 - protein, 141 aa, synthetic construct
RALDFYSIHVTKESTHPVKPLAQIAGNRYASTPVGKALSDACMGTIASFLSKYQDIIIEHQKVVKGNQKRLESLRELAGKENLEYPSVTLPPQPHTKEGVDAYNEVIARVRTWVNLNLWQKLKLSRDDAKPLLRLKGFPSF

SEQ ID NO: 14328 - protein, 168 aa, synthetic construct
PLVERQANEVDWWDMVCNVKKLINEKKEDGKVFWQNLAGYKRQEALRPYLSSEEDRKKGKKFARTQLGDLLLHLEKKHGEDWGKVYDEAWERIDKKVEGLSKHIKLEEERRSEDAQSKAALTDWLRAKASFVIEGLKEADKDEFCRCDLKLQKWYGDLRGKPFAIEAE

SEQ ID NO: 14329 - protein, 110 aa, synthetic construct
SNCGFTITSADYDRVLEKLKKTATGWMTTINGKELKVEGQITYYNRYKRQNVVKDLSVELDRLSEESVNNDISSWDKGRQGEALSLLKKRFSHRPVQEKFVCLNCGFETH

SEQ ID NO: 14330 - protein, 110 aa, synthetic construct
SNCGFTITSADYDRMLEKLKKTATGWMTTINGKELKVEGQITYYNRYKRQNVVKDLSVELDRLSEESVNNDISSWDKGRSGEALSLLKKRFSHRPVQEKFVCLNCGFETH

SEQ ID NO: 14331 - protein, 110 aa, synthetic construct
SNCGFTITSADYDRMLEKLKKTATGWMTTINGKELKVEGQITYYNRYKRQNVVKDLSVELDRLSEESVNNDISSWTKGRQGEALSLLKKRFSHRPVQEKFVCLNCGFETH

SEQ ID NO: 14332 - protein, 141 aa, synthetic construct; identical to SEQ ID NO: 346

SEQ ID NO: 14333 - protein, 168 aa, synthetic construct
PLVERQANEVDWWDMVCNVKKLINEKKEDGKVFWQNLAGYKRQEALRPYLSSEEDRKKGKKFARYQLGDLLLHLEKKHGEDWGKVYDEAWERIDKKVEGLSKHIKLEEERRSEDAQSKAALTDWLRAKASFVIEGLKEADKDEFCRCELKLQKWYGDLRGKPFAIEAE

SEQ ID NO: 14334 - protein, 164 aa, synthetic construct
SSNIKPMNLIGVDRGENIPAVIALTDPEGCPLSRFKDSLGNPTHILRIGESYKEKQRTIQAKKEVEQRRAGGYSRKYASKAKNLADDMVRNTARDLLYYAVTQDAMLIFENLSRGFGRQGKRTFMAERQYTRMEDWLTAKLAYEGLPSKTYLSKTLAQYTSKTC

SEQ ID NO: 14335 - RNA, 22 nt, synthetic construct
  source 1..22: mol_type = other RNA
agctccctcttcggagggagca

SEQ ID NO: 14336 - DNA, 60 bp, synthetic construct
  misc_feature 1: note = 5' Amino Modifier C6 attached
  source 1..60: mol_type = other DNA
tgaagctgacagcattcgggccgagatgtctcgctccgtggccttagctgtgctcgcgct

SEQ ID NO: 14337 - DNA, 60 bp, synthetic construct
  misc_feature 1: note = 5' Amino Modifier C6 attached
  source 1..60: mol_type = other DNA
agcgcgagcacagctaaggccacggagcgagacatctcggcccgaatgctgtcagcttca

SEQ ID NO: 14338 - DNA, 60 bp, synthetic construct
  misc_feature 1: note = 5' Amino Modifier C6 attached
  source 1..60: mol_type = other DNA
tgaagctgacagcattcgggcctagatgtctcgctccgtggccttagctgtgctcgcgct

SEQ ID NO: 14339 - DNA, 60 bp, synthetic construct
  misc_feature 1: note = 5' Amino Modifier C6 attached
  source 1..60: mol_type = other DNA
agcgcgagcacagctaaggccacggagcgagacatctaggcccgaatgctgtcagcttca

SEQ ID NO: 14340 - DNA, 60 bp, synthetic construct
  misc_feature 1: note = 5' Amino Modifier C6 attached
  source 1..60: mol_type = other DNA
tgaagctgacagcattcgggccgagatatctcgctccgtggccttagctgtgctcgcgct

SEQ ID NO: 14341 - DNA, 60 bp, synthetic construct
  misc_feature 1: note = 5' Amino Modifier C6 attached
  source 1..60: mol_type = other DNA
agcgcgagcacagctaaggccacggagcgagatatctcggcccgaatgctgtcagcttca

SEQ ID NO: 14342 - DNA, 60 bp, synthetic construct
  misc_feature 1: note = 5' Amino Modifier C6 attached
  source 1..60: mol_type = other DNA
tgaagctgacagcattcgggccgagatgtctcgatccgtggccttagctgtgctcgcgct

SEQ ID NO: 14343 - DNA, 60 bp, synthetic construct
  misc_feature 1: note = 5' Amino Modifier C6 attached
  source 1..60: mol_type = other DNA
agcgcgagcacagctaaggccacggatcgagacatctcggcccgaatgctgtcagcttca

SEQ ID NO: 14344 - DNA, 60 bp, synthetic construct
  misc_feature 1: note = 5' Amino Modifier C6 attached
  source 1..60: mol_type = other DNA
ctttcagcaaggactggtctttctatctcttgtactacactgaattcacccccactgaaa

SEQ ID NO: 14345 - DNA, 60 bp, synthetic construct
  misc_feature 1: note = 5' Amino Modifier C6 attached
  source 1..60: mol_type = other DNA
tttcagtgggggtgaattcagtgtagtacaagagatagaaagaccagtccttgctgaaag

SEQ ID NO: 14346 - DNA, 60 bp, synthetic construct
  misc_feature 1: note = 5' Amino Modifier C6 attached
  source 1..60: mol_type = other DNA
ctttcagcaaggactggtctttctatctcttgtacgacactgaattcacccccactgaaa

SEQ ID NO: 14347 - DNA, 60 bp, synthetic construct
  misc_feature 1: note = 5' Amino Modifier C6 attached
  source 1..60: mol_type = other DNA
tttcagtgggggtgaattcagtgtcgtacaagagatagaaagaccagtccttgctgaaag

SEQ ID NO: 14348 - DNA, 60 bp, synthetic construct
  misc_feature 1: note = 5' Amino Modifier C6 attached
  source 1..60: mol_type = other DNA
ctttcagcaaggactggtctttctatctctcgtactacactgaattcacccccactgaaa

SEQ ID NO: 14349 - DNA, 60 bp, synthetic construct
  misc_feature 1: note = 5' Amino Modifier C6 attached
  source 1..60: mol_type = other DNA
tttcagtgggggtgaattcagtgtagtacgagagatagaaagaccagtccttgctgaaag

SEQ ID NO: 14350 - DNA, 60 bp, synthetic construct
  misc_feature 1: note = 5' Amino Modifier C6 attached
  source 1..60: mol_type = other DNA
ctttcagcaaggactggtctttctgtctcttgtactacactgaattcacccccactgaaa

SEQ ID NO: 14351 - DNA, 60 bp, synthetic construct
  misc_feature 1: note = 5' Amino Modifier C6 attached
  source 1..60: mol_type = other DNA
tttcagtgggggtgaattcagtgtagtacaagagacagaaagaccagtccttgctgaaag

SEQ ID NO: 14352 - protein, 979 aa, synthetic construct
QEIKRINKIRRRLVKDSNTKKAGKTRGPMKTLLVRVMTPDLRERLENLRKKPENIPQPISNTSRANLNKLLTDYTEMKKAILHVYWEEFQKDPVGLMSRVAQPASKKIDQNKLKPEMDEKGNLTTAGFACSQCGQPLFVYKLEQVSEKGKAYTNYFGRCNVAEHEKLILLDQLKPEKDSDEAVTYSLGKFGQRALDFYSIHVTKESTHPVKPLAQIAGNRYASTPVGKALSDACMGTIASFLSKYQDIIIEHQKVVKGNQKRLESLRELAGKENLEYPSVTLPPQPHTKEGVDAYNEVIARVRMWVNLNLWQKLKLSRDDAKPLLRLKGFPSFPLVERQANEVDWWDMVCNVKKLINEKKEDGKVFWQNLAGYKRQEALRPYLSSEEDRKKGKKFARYQLGDLLLHLEKKHGEDWGKVYDEAWERIDKKVEGLSKHIKLEEERRSEDAQSKAALTDWLRAKASFVIEGLKEADKDEFCRCELKLQKWYGDLRGKPFAIEAENSILDISGFSKQYNCAFIWQKDGVKKLNLYLIINYFKGGKLRFKKIKPEAFEANRFYTVINKKSGEIVPMEVNFNFDDPNLIILPLAFGKRQGREFIWNDLLSLETGSLKLANGRVIEKTLYNRRTRQDEPALFVALTFERREVLDSSNIKPMNLIGVDRGENIPAVIALTDPEGCPLSRFKDSLGNPTHILRIGESYKEKQRTIQAKKEVEQRRAGGYSRKYASKAKNLADDMVRNTARDLLYYAVTQDAMLIFENLSRGFGRQGKRTFMAERQYTRMEDWLTAKLAYEGLPSKTYLSKTLAQYTSKTCSNCGFTITSADYDRVLEKLKKTATGWMTTINGKELKVEGQITYYNRYKRQNVVKDLSVELDRLSEESVNNDISSWTKGRSGEALSLLKKRFSHRPVQEKFVCLNCGFETHADEQAALNIARSWLFLRSQEYKKYQTNKTTGNTDKRAFVETWQSFYRKKLKEVWKPAV

SEQ ID NO: 14353 - protein, 978 aa, synthetic construct
QEIKRINKIRRRLVKDSNTKKAGKTGPMKTLLVPVMTPDLRERLENLRKKPENIPQPISNTSRANLNKLLTDYTEMKKAILHVYWEEFQKDPVGLMSRVAQPASKKIDQNKLKPEMDEKGNLTTAGFACSQCGQPLFVYKLEQVSEKGKAYTNYFGRCNVAEHEKLILLYQLKPEKDSDEAVTYSLGKFGQRALDFYSIHVTKESTHPVKPLAQIAGNRYASGPVGKALSDACMGTIASFLSKYQDIIIEHQKVVKGNQKRLESLRELAGKENLEYPSVTLPPQPHTKEGVDAYNEVIARVRTWVNLNLWQKLKLSRDDAKPLLRLKGFPSFPLVERQANEVDWWDMVCNVKKLINEKKEDGKVFWQNLAGYKRQEALRPYLSSEEDRKKGKKFARYQLGDLLLHLEKKHGEDWGKVYDEAWERIDKKVEGLSKHIKLEEERRSEDAQSKAALTDWLRAKASFVIEGLKEADKDEFCRCELKLQKWYGDLRGKPFAIEAENSILDISGFSKQYNCAFIWQKDGVKKLNLYLIINYFKGGKLRFKKIKPEAFEANRFYTVINKKSGEIVPMEVNFNFDDPNLIILPLAFGKRQGREFIWNDLLSLETGSLKLANGRVIEKTLYNRRTRQDEPALFVALTFERREVLDSSNIKPMNLIGVDRGENIPAVIALTDPEGCPLSRFKDSLGNPTHILRIGESYKEKQRTIQAKKEVEQRRAGGYSRKYASKAKNLADDMVRNTARDLLYYAVTQDAMLIFENLSRGFGRQGKRTFMAERQYTRMEDWLTAKLAYEGLPSKTYLSKTLAQYTSKTCSNCGFTITSADYDRVLEKLKKTATGWMTTINGKELKVEGQITYYNRYKRQNVVKDLSVELDRLSEESVNNDISSWTKGRSGEALSLLKKRFSHRPVQEKFVCLNCGFETHADEQAALNIARSWLFLRSQEYKKYQTNKTTGNTDKRAFVETWQSFYRKKLKEVWKPAV

SEQ ID NO: 14354 - protein, 979 aa, synthetic construct
QEIKRINKIRRRLVKDSNTKKAGKTRGPMKTLLVRVMTPDLRERLENLRKKPENIPQPISNTSRANLNKLLTDYTEMKKAILHVYWEEFQKDPVGLMSRVAQPASKKIDQNKLKPEMDEKGNLTTAGFACSQCGQPLFVYKLEQVSEKGKAYTNYFGRCNVAEHEKLIKLAQLKPEKDSDEAVTYSLGKFGQRALDFYSIHVTKESTHPVKPLAQIAGNRYASGPVGKALSDACMGTIASFLSKYQDIIIEHQKVVKGNQKRLESLRELAGKENLEYPSVTLPPQPHTKEGVDAYNEVIARVRMWVNLNLWQKLKLSRDDAKPLLRLKKFPSFPLVERQANEVDWWDMVCNVKKLINEKKEDGKVFWQNLAGYKRQEALRPYLSSEEDRKKGKKFARYQLGDLLLHLEKKHGEDWGKVYDEAWERIDKKVEGLSKHIKLEEERRSEDAQSKAALTDWLRAKASFVIEGLKEADKDEFCRCELKLQKWYGDLRGKPFAIEAENSILDISGFSKQYNCAFIWQKDGVKKLNLYLIINYFKGGKLRFKKIKPEAFEANRFYTVINKKSGEIVPMEVNFNFDDPNLIILPLAFGKRQGREFIWNDLLSLETGSLKLANGRVIEKTLYNRRTRQDEPALFVALTFERREVLDSSNIKPMNLIGVDRGENIPAVIALTDPEGCPLSRFKDSLGNPTHILRIGESYKEKQRTIQAKKEVEQRRAGGYSRKYASKAKNLADDMVRNTARDLLYYAVTQDAMLIFENLSRGFGRQGKRTFMAERQYTRMEDWLTAKLAYEGLPSKTYLSKTLAQYTSKTCSNCGFTITSADYDRVLEKLKKTATGWMTTINGKELKVEGQITYYNRYKRQNVVKDLSVELDRLSEESVNNDISSWTKGRSGEALSLLKKRFSHRPVQEKFVCLNCGFETHADEQAALNIARSWLFLRSQEYKKYQTNKTTGNTDKRAFVETWQSFYRKKLKEVWKPAV